United States Patent Application Publication US 2025/0295137 A1 - sequence listing, part 7

SEQ ID NO: 7 - DNA, 1891416 bp, Latilactobacillus curvatus
  source 1..1891416: mol_type = genomic DNA
ccaaatatttttttgggtgataggacatccagtccttttgggccaaaggccttataacgttgaacccacgagacaactagtgagttactcttaataccatattttctcgctattaatttataacctaagggtgacgttagataatcctgaacaacttttatttttaatgttttagaatatttggtcaatataaaaacccccgatattggattttggtccaatatcgggggttcacttcagagacagattttgtcttagcctctttttttgtgttacttttcaggaagaactcgcctaccagctctccgtcttaagtctgatttataagcgaattacttgaaagtttgacctattttgactattatagaattagtcagaataatctgacacttaatttaaaaaataactgaaaaaggaatgacgtctatgaatccagaacaaatgacacaagctgtccaagatgcacttgcagaagcgcagaaaatcgcgatgacgcgtcatcaaactgaaattgatattccacacctctttaaatatttagtccaaccacaacaactaggacggcaaatttaccaagaagccggtgcagatatcgatgctcttgaggcggagattgatcgtgaaattgacgcaattccaacggttgaaggtcaaacgaattacggtcaaaacatctcacaaaacttgtaccaagtattaactgctgctgaaaaatacaaaacagaattccaagatgaatttttatcaactgagacggtcatcttgggcttaatgggtttgaaataccaggcactcgttcaatatttacagaaacaaaatgtcactgaacaaaaattaaagaaagtcattactgatttacgaggaggcgagcgtgtgacatctaaaaaccaagaagataattaccaagcgcttgaaaaatacggaacggatttaatcaaagcggtccgttctggcaaaatggatccagttattggccgggacgaagaaattcgagatgttattcggattttgtcacggaaaaccaagaataaccccgttttaattggggaacctggtgtcgggaaaacggcgattgttgaaggattagcgcaacgaatcgtccgtaaagatgtgcccgataatttaaaagataagacaattatttcactggatatggggactttaatcgccggggccaaataccggggtgaatttgaagaacgacttaaagctgtgttaaaggaagttaagaagagtgaaggtcggattctggtcttcattgatgaaattcacacgattgttggtgctggtaagactgaaggtagcatggatgctgggaacctcttgaaaccaatgttagcgcgtggtgaattacacatgattggtgcgacaacgttggatgaataccggcaaaatatcgaaaaagataaggcgcttgaacggcgtttccaaaaagtgctagttcaagaaccatccgttgaagataccatcagtattttacgtggtttgaaggaacggtttgaaattttccacggtgtccggattcacgataatgccttagtcgcagctgcgacgttgtcaaatcgctacattacggatcgattcttaccggataaggcaatcgacttagtagatgaagccagtgccaacattaacgtcgaaatgaattcacaaccaacggaattggatcaagcaacgcggcaattaatgcaacttgaaattgaagaagaagcgttaaagaaagaaaccgacgccgcttcgcaaaaacgattggctgagacgcaaaaacaattagctgatttacgcgaaacaacgaataatttaaagatgcggtgggaaactgaaaaagaagatttgaaccgcattaatgataaaaaagcggaaattgatgctgctaaacggcaattagaagaagcacagggaaattatgatttagaaacggctgctaagttgcaacacggcacaattccacaattagaagaagaccttgccgaccttgaaaaggctgaaaagccagaggactggatggttcaggaatccgttactgaaaatgaaattgcaacggtggttagttcccaaactgggattccagtcgccaaattagttgccggtgatcgacaaaaattactgcgtcttgccgatgttctgcatgaacgggtaattggtcaagatcaagctgtcaatgctgtgacagatgctgtattacgttcacgggctggcttacaaaatccagaccgtccgcttggctcattcctcttcttaggaccaacaggggttgggaagaccgaattagcaaaagctttagctgaggatttatttgattctgaacggcatatggtccgcattgatatgagtgaatatatggaaaaatattctgtatcacgattggtcggtgccgcaccgggctatgttggctatgaagaaggtggccaattaactgaagcggttcggcggaatccatacacaattgtgttattggatgaaattgaaaaagcccatccagatgtctttaacattttattacaagtgttggatgacggtcgtttgacagactcacaaggacggacggttgactttaagaatacaatcatcattatgacttctaacttgggttctgaaatcttactggacggtgtagatgaagaaggtcaagtttcacaaacggctaaggaaagtgttcaagacttaattcagacgaaattcaagccagaattcttgaatcgaattgatgatacaattatgtttacaccattgagcttgaacgatattcaagcgattgtggtcaaaatgcttcatgatctatcagaccgtttgtcagatcaagaattgacattgacgatttcagatgctgctaaacaatgggtggcagaagaaggttacgatcctgcatttggggcgcggccattacggcgttttattacgaaccatatcgaaaccccattggctaaagaaattattgccgggcatatgttaccaggaaccacggttgaaattaacttaaaagataaccagttagtttttgaaaatcgctaacgattgaaaaagcgctgcaaatttaatttgcggcgctttttttggacatcaatcagggattattactgtcagattgatgtttgtatggtacacttattggggatgatgtacagaatgttagtgacgattaaggacgattccactttgaaagtggtgtcattaagagtcgttaatcaattgtttttctgtaattgacttgctcttagcggataaacatagtattatagaagtcgcggacaaaagtagcgggacacgtgatgatttaaaatcaatttgaatgggattgagataatccttgccaaattccccgagttcggtatatcattaatgaatctaagatataaaggagtctgaaaataatggcagttccagcaagaagaacatcaaagacgaagaaacgtatgcgtcgtggacatatcaaattgaacacaccaaacgtacaattcgatgcaactaatggcgaataccgtgtaagtcaccgtgtatcaccaaaaggtttctataaaggcgaacaagttgttacaccaaaagctaacgactaatcgtcatcgagagtttctgaataagaaactctttttttatgcagtttcctagttttaaatactagatggtggtataattagtattgaataaaaggagattgataattatgaaaaatgaacacttgaaacaaaagctcgatcgtttacaaattgtacgcttaccacgttggacagacctgcccgatttggaactatatatggatcaagtggttagttacatcaatcaatacctaaacgcgttaaatttagatgaaatcaccgcttcaatgattaataattacgtcaaaaaagaaattgtggcagcaccgattaaaaaacggtatacaaaatcgcaaattgctcaagttttaattattgcactattgaaaacgagtttttcgattgaagaaatcaaacaattgatgacagcggaaacacctaaccgaaatgaaaagcaactttatgattactttatcttaacgtttttagcagcgattcatcagttagatgaggattacagcccctatgaccaaggcaaaaatccagcaggtacattggtcactgaaccccaacaaacattgctgaaattagcatgtcagagtgtggtatataagattgcaattgggattactttgaagaaagaaccagttgaagaaaaaacgccagcaaaaaataagtaattgactagaaaatgagaattgaattaagattcacaaataattcaattacaaaaataatgaattcgtttacctctttctattttcgccgtaaaataaaggtaactaattagtttattaacaaatgttagttaactaatttttattcagaggattaatcattgtggttaagtctgaaaaaaatgaaagaggtgttttaggtggcagaaaagaagaagacgaataagttaacgcttggtgcgcttattctaatggtctttacgtcagtctttggatttacgaatatcccacgtgcgttctacttgatgggatatgcatcaattttttggtatgttttagcagctgttaccttctttattccttatgcatttatgctcggagaaatgggagcggcctttggtgaagcaaagggggggatttactcttggatggagaaatccgttaacgctaaatttgcctttgtcggcacatttatgtggtttgcttcatacattatctggatggttaacgtcgggaacgggatttggattccattatcaaacgcctttttcggggttgataaaacacaagaatggtcaatctttggtttgacaaatggtgtgcaaacattaggaattttagctattatttggatcattgtcattacctttgtcacatcaaaaggccttgataaaatcaagaaaatcaccagtattggtggttcagccattacgttaatcaacgtgattttattcttgggtggtttgttaatccttgttttaaataaaggggtaatggcacaacctgttacaacccatgcattcttccaatcaccaaatcaaagctatacatcgatgattcaagtcttcagtttcgttgtatttgcgatcttcgcttatggtggtcttgaagttgttggtggattagtagatgaaactgaaaacgctaaggttaactttccaaaagggttagctatttctgctgtcgtgattgttgtcggctatgctgttgggatttttatgatggggactttcactaactggaacttcgtctttaccaatggtggtggcttcgccaaagcaaccggttcaaacgcaaccgttactttggggaacgttgcttatattgccatgaacaacatgggttaccaattagggttagcaatgcacttaagtgaacatgctgctattcaagttgggatttggctcagtcgttacatggggctttcaatgttcttagcacttagtggtgctttctttacaattattttctcaccattaaaaacaattatcgaagggacacctgctgccttttggcctaagtcatttactaagaaaaatagtaataatatgccggtcaatgcaatgaaggtccaagctgcaattgtaattgtgattattgccttcgttgcttttggtggtaagagtgctgctaagttcttcgatatcttaacagcgatgacaaacgtttcaatgacattgccatacatgtttgtggcatactcatactttggctttaaaaaggatgaaagtatcgaaaaaccatttacaatttataaagggaagaccttctataaattctgtgtctgcatggtcatgttcacagttggttttgcgaacgtctttacgattattcaaccagcaattgatggtaatttaagtcaaacaatctggtcagttgctggccctatcttcttcacaattgttgcattatatatgtttaaccgttatgaaaagaaaacaaatttaaaataagtttttaaaagagcggccgttaagtggtcgctctttttgattggtcttaaaaaatgtgacacttcgtcgttttcgcttgaattgtgattctaaaagggttaagctaagatttcaatgagttaaatttcaatgaaaaggtgacgaatatgaaaaaaacaattgttggtttagtgaccagcttagggctaatcggtctattggctggttgtgggacaaccaaattaacaacgactaaaacaaattatcgccaaaatggaatggtggcagtcgtaaaaggttcaacaaccaaaaaagctgatttacaataccggattaatcataatcatttccaaaaagcaacggtcaaagacggaacttatgtgattcaagtaccaacaacgactaacaaacaaacagtaacggtacaagctaaagcaaacggtaaaaccgttcaaaagaaggtaacgattgcagcgggcacatcagttggccaatatgccaagattgccgcgcaatacaaccaggctttaattgggatggcgttatctaaggcagatcaaaccaaagcgcaggaattgcaaaaacaagcagcagctgccaaagcaggccaacttgcacctgctgatctgatgacacttaagcagcggcaacaggaagtacaagcagcaatgcaacaggtgcaacagacacaaaaggatcaattgctaccaaccacacctaaaaatggggtgactgaatgggtcgcaacaaagcatgtcaccattcgcggttctgttgatagtcaagatgtaatggggatgacgctcattacacccgttaaagcgctcaaagataaagcggcattgaaagattttgggaccagttttgcattgattgcgcaagcaacgggcgctgattccaaaaaagtgatgtccgaatttagcgattatacgaagaaaaacaaaaaaggtagtcaaaccacgatgaagacgattgaatcaaatggtgtgaagttcaataccggtttttcaacaagtaatttgtatatttacattacaaaataaacgtaaaaagggccgcaacataaagttgcggcccttttttgtgctttatttagctggatcttttggtaagacaagaggtaagaagttgagcaaaagcccaaaaataactgagacgataacagttgtttgaatgttaaagccggttttcgttagtttagaaccgataaatccaatgacaaacccaaaaatcaatgtccaaagtagattcataacgtatttcatagttggccttctttctttgattcaattctatgatattgtaacacgttttccaaagagaatcatttgaaataatttgttatactaagagtaatcgaattaacgaagaaagaaggggcgttgcttgccattcgttcaactacaggttaagagtacctatacgctcttggaaagtaccactaaaattgatgcactgattgaaagtgctaaggcgcgcggctatcagagtattgcgctgacggataagaacgtgatttatgggctagtcgatttttataaggcggccaaggcagctgacttacatccaatcttgggtttaacgcttgaaattggcggattacttcaaaccgatgaacggtttccgctaattgtattggcgaaagatttagttggctatcagaatcttttgaagctttcttctaaagtgatgactcaaactgatctggtttcatttgctgatattacacagtggttcagccatttagtagtgatcacaccggctcaagatggcgaattagtccgcctacttttgcaagcggaggagcaaacaacggcatatttgacgcaactccaggcggcagttgatccggggagcttgtatttaggaatcagtgccaagcgagcagcagccccccaacttagcgggttaattgcattgagtcagacgaccggagttccgctggttgcgttaggtgatgttcgttatctagaaccagatgatgctttttcagtgcaagtcttacaacatattaaagctggtacgcaagttaatctccatagtggtgatcagacaacgccaggcggctattatttacaagctgctgatcagattacggccgagtttgaagcattgcagttggtcgaggccgtgcacaatacggataagattgcccaactctgtcaagttgagttgacctttaagcgggcccaattaccacgctttgaaacaccgcatcaagagtcggcaacggcatatctagaacagttaagtcagcaaggcttacaagttcggtttgccgatcaagcgattccgcaagaatatcaagaacgcttgcagtatgaattgcgagtgatcaacgagatgggctttgccgattatttcttaatcgttgccgatgtcatgcggcatgcccatgaacaacatattatgacgggcccagggcgaggctctgcggcagggtcgttggtggcctatgctttaatgattactgatgtcgatccgattcaatatcaattgttgtttgaacgttttttgaaccccaatcgggcgaatatgccagatattgatttggatatcccagataatcgtcgggatgaagtgctggcctatgtctatcacaaatacggtcggaatcatatggcgcaaattattacatttggcacactggcagctaaaatggcgttacgtgatgtggggcgtgtgtttggcttaagtcagtttgaaatgaatgattgggctaaggtaattccggacatgctgaaaatcacgttaaaagaagcttatcaacaatcacaaccattgaaaaatttggtggccgattccgctcaaaatcgattactattcgagacagcacagaaacttgaaggactgccacgacactactcaacgcatgcggctgggattgtgttaagccaagcaccgttaactgatacggttgcattacaaagtggcggtgaagagattgaacttacacaattgccaatgggcaacgtggaagaactgggcctactgaagattgactttttaggattacgtaatttagggattcttgctaatattgtaaagcttgttggacagcaaacgggacagccgtttgacccacactcaattccgttggatgatcctaaaacacttgcattattccaacatggtgatactaatggtattttccaatttgaatcacttggcattaagaatgttttacggcggttggcaccgagttcttttgaagacgtcgtggcgacaaatgcgttgtatcgaccaggtccgatggaaaacatcgacgtatttatcgctcgtaagaacgggcaagaacctgtcacttatccggacgcgtcgttagccgatattttagagccaacgtatgggatcttagtgtatcaagaacaagttatgcaggctgcgtccaagatggggggctttagcttaggcgaagccgacttattgcggcgagcaatgagtaaaaagaagaaggcggtgattgatgctagccggacgcaatttattcaaggcgcactcgaacgcgggcacacagaaactgctgctacgacagtctacgactatattgagcggtttgccaattatggatttaaccggtcacatgctgttgcttatagtaaaattgctttctggttggcttatttaaaggttcatcagccagcagccttttttgcagctttattaaatgccgttttgaacaatccgacaaaaacgaaaacttacttagcagaagctaagaaacgtcaaattaaagtgctgccacctgatattaaccgcagtcaaagttatttcagattagccgactcagggattatctttggtttgttcagcattaaaaaagttcggcgcgattttgtggcggcgattattcaagaacggacaacgaacggaccgtttaaatcgttactggccttcttacagcggatggatcctaagtttctcaagcaagaggcattagaagccttgatttatagtggcgccttcgatcagtttaatccgaatcggaatgcgctgttgaccaacttagccgacctgcttgatagtgtgaagttgtcagggaataacgtcgatttatttgctgttttagcaccgaaagaacgtgccgtaccgaatttaaccttgactgaacgattggataaagaagctgaatatcttggggtctatgtttcggggcatccggtcgaaaaatatgatcgtgtacgccaacactaccatgtgcctgatatcagtgatttggcacccgagcagacggtccatttggtgctattcattcgccgaattaaggtgattcgaacgaaaaaaggcgatcaaatggcgtttgtaacggggcaagatgcaaccggtgaaattagtgtgacgctctttactggcgtttatcaacgggtcagtaaatggctacaaacaggacaagttgtttttatcaccgggaaagttgaacaacgtcgcgatttacaagtggttgctaatcagattcaattggcacaagatgcacaaaagacgctacccaaagcgaccctttatttacgggttcaaacggcgttgacgagtcaagcgcaacaacaaatgtatcaattgttacaacaaaatcaaggaacaacgccagttatcttgtacaatgcggccgataaacagtcaattctattgaacgagcgctattgggttgtgagcaacgaaaaactaacgaccgcgcttacaaaccttttagggacgggaaatgtgattttaaaagggtttgaccaataaagaaattggtctatctttgcgaaaatcttcgcaaaagacaagacttattttctgaaaagtgataatatattagtgactttgaaagaccaattggttttttaagtaaaatatttgcctggggtgaaaagatgaaacgcataggtattttgacaagtggtggggatgcacctggtatgaacgctgccatccgtgccgttgcaagaaaagcaatgcatgaaggccttgaagtctatggtatcaattatggttacgctggtttagttgccggagatatcttcaagatggacccaattacggttggtgacaagattcaacgtggtgggacattcttgtactcagcacgttatccagaatttgcacaagtcgaaggacaattgaaaggtattgaacaactcaagaagtttggtatcgaagctttagttgtcatcggtggtgatggttcttatcacggtgcacttcgtttaactgaacatggttataacgcaattggtcttccaggaacaattgataacgatattccatttacagatcaaacaattggtttcgatacagctgtgaacacagtgctcgaatcaattgaccggatccgtgatacagctgctagtcacgaaagaactttcgttgtggaagtaatgggtcgtggcgctggtgatatcgcgctttgggctggtgttgccggtggcgcacaagacattattatccctgaacatgatttcgacgttaaggccgttgctgataagctacgtacttcacgtgaacatggtcaaaaacacgctgtcattgtattggctgaaggtgtgatgcacgctgatgaattctcagaaaaactttctgaatacggcgatttccacttacgttcaactgttttaggacacgttgttcgtggtggggcaccaacagctagtgaccgtgtgttagcaagtcgtttgggctcaaaagcagttgaattattgcttgaaggcaaaggtggcgttgcacttgggattgaaaagaacgaaattatcgcacatgatatgttagacttgttcaatcacaagcatcacgcaatgttagatctttatgatttaaacgaagatttagcttactagattcatcgttccatatataaaattgttaaaacgactgaaaagtcttttaaaaaatagacataaaaggagagattccacttatgaagaaaaccaaaatcgtaagtacacttggacccgcaagtaacaatgttgaaactatcgcaaaattaatcgaagcaggtgctaatgtattccgctttaacttctctcatggtgatcatgaagaacatttaagccggatgaacatggttcacgaagctgaaaaattaactggtaaaacagttggtatcatgttagatacaaagggtgctgaaatccggacaactgttcaacaaggtaagaaatttgaattacacactggtgaagtggtacgtatttcaatggacgatacacttgaaggaacacctgaaaaaatcgctgttacttacccaggtctatacgacgacacacatgtcggcggacacgttttaatcgatgatggtttagtggatcttaaaattattgaaaaagacgaagcaaacaaagaacttgttactgaagttcaaaacgacggtatggtcggctcacgtaaaggtgttaacgcacctggtgtttcaatcaacttacctggtatcacagaaaaagatgctagcgacattcgttttggtttagatcacgaaatcaactttatcgctgcaagttttgttcgtaaacctcaagatgttttagatatccgtgaattattagaagaaaaacacatggaacatgttcaaatcttccctaagattgaatcacaagaaggtatcgacaacattgacgatatcatgaaagtttcagatggtttaatgattgctcgtggtgacatgggtgttgaaattccatttgaaaatgttccttttgtacaaaagaacttgatcaagaaatgtaacgctattggcaaaccagttatcacagctacacaaatgttggactcaatgcaagaaaacccacgtcctacacgtgctgaagttaacgacgttgctaacgctgttattgatggtactgacgcaacaatgctttcaggtgaaagtgctaacggtgactacccagtagaagctgttgcaacaatggctcgcattgatgaaagaacagaaaaatcattaacagaccgcgatgcatacgcattgaaagcatacagcaagactaacttgacagaatcaattggccaagctgttgctcacaccgcacgtaacttaggaatcaagacaatcgttgctgctacagaatcaggctcaacagcacgtatgatttctaaataccgtccacaagctgacatcttagccgttacattcgacgaacgtacacgtcgtggtttaacagttaactatggtgtatacccagttatcgctaagaaacctgctaatacagatgatatgttcaacttagctacacaaacagctcaagaacatggttttgctaaagaaggcgacctaatcttgatcactgctggtgttcctgttggcgaacgtggcacaacaaacgttatgaagatccaattaattggttcaaaattaacacaaggccaaggtgttggcgatgaaacaatcgttggcaaggctgttgtcgcttcaaacgctaaagaagctgctgaaaaagcaattgatggtggtatcttagttgttaaatcaactgacaaagattacttaccagcaatcgaaaaatcaagtgctatcgttgttgaaaacggtggtttaacatcacacgctgctgttgttggtatcgctatgggtattccagttgttgttggtgctaaagacgcaacagaagctatcaaagatggcgaagttgtgactgttgattcacgtcgtgggattgtttaccgcggtgcaacaaacgctctttaatcattcctgaatgatgaaatgaagccccctctgaaaagagggggctttttttgttttaaaaacgcgaatcttgaattacttttctgaaaatactgacaagtcgttcatttatcggtacaatagtagggagactttattggaggtttacatggaaagttggttatttttagtagcgattttaatcgttgcattgttagcgaaaaatcaatctttaatcattgcgaccgcggttgttttaatattaaaggtattcccgatttcaaataaggtgctgcctgtgatccaagccaaaggcattaattggggagtgacagtgatttcggttgctatcctagtcccgattgcaacggggcaaattggtgtcaaagacttaatcaatgcctttaaaacgccggcgggttttattgcagttggttgtggcgtgttagttgctgtactatcagcgaagggtgtggggctattgtccgctagtcctgagatgacagtggccttggtttttgggaccatcatgggtgtcgtttttctaaaagggattgcggctggccccgtaattgcagcggggattacttataccattttaacggtctttaatttagtaccaattcattaattaataagaataaaagaggttaactatgaatgaattaatcgggcaagtcattactgccttagtaacagatgaaaatgaaacagccttctttgtccaaaaagacggcgtgacatttgaattaaaaaaagaaactttagaacaagaattgacaatcggtgaaacggtgactggttttgcttatgaaaactcaagtcgggaattgatcttatcaacgtttattcctaaatcacgcgtgggccattatgcctttggtgaagtggttgaaacgcggcgtgatttaggcgttttcgtcaatattggcttgccagataaggatattgtcgtatcactggatattttaccaaccattacgaaattatggcctaaaccaggtgatcgtttaatgattgcgattgaagtcgatcaaaaagggcggatgtggggccaactagctgacgaaagcatcttcagatcaatttcaaaaggtgctaaaccagaaatgaagaaccaagacgtgatggggacggtctaccgtttgaagttagccgggacgtttattttaacggatgacttttacattgggttcattcatccttctgaacgtgaagcagaaccacgtttgggtcaacaggttaaggggcgcgtcattggtgtgcgacctgaaggtagtttaaatgtcagtttgaaaccacgggcatatgaagaaattggcgacgatgctgaaatgattatggctgtcttaaaacggcaacctgattacgcaatgccatacactgaccggagcgatccagaagcgattaagagttactttgggattagtaaaggcagttttaagcgggcattaggccggttaatgaaaaatggcttaattactcaagcagagggcctaacgagtttaactgaaaaaggtcaagctgatattgccccaattacagatgacgagaagcaagactaagcttttttgaatgattgaaaaggaagttgctaaatggataaagctgagcaattagaccgaatatccgagcagctacaagcggccggctacaagttaacagcacaacgctctgcgacggtggcggtcattttggaccatgcccaagcgcatctgagtgccgaacagatttttatggcaactaaagaggtggtccctgaaattgggttggccactgtgtatcgcacccttgagatgttgacggaactgcatgtgttgaataaagttcggttcattgaagatgggatgacccactatgacttgtgtgagactgatcacgaccatcatttccaccatcacctgttgtgtctgcaatgtggggcaatcgaagaaattcatacggatttattgcctgccgtggaacaacaggtatatgatgattacacatttacggtgttagatcatcgtttaacatttcacgggatttgtgcacgttgccaacagattaaccaacaaaatgggttaccagccaatcaactggatcctagtcgccaaattgacgtgacgcagttgtaaaagaggaagcacatggatgatttaattcaagattatttacattatttaaaagttgaacgcggtctttcggagaatacgcgccagagttatcggcaggatttacaacagtttgcggcgtttttacaacgtcagcaggttgccaattttactgaagaccgctttttaattttgaactacttgcaagaacaaactgatgtgcataaggcacaaagtagtattacacggagcatttcaacgttacgtaaattctatcagtatttagcgcgtgaaaagcagattaaacaaaatccgatgctccaaatcgattcgcccaaacaaggccgtcatctaccggctgttttatcgacggcggagattgagcgactattggcggcaccagatacgagcaccgcacttggattacgagatcgagcgattctagaggttttatatgcgacggggttacgagttagcgagctgattcatctaaagatggctgatttgcatttatcactgggcttaattcagaccctcggcaaagggaataaggaacggattataccgattggtgatgtagcggttgattggattaatcaatacctcgatcgtagccggaatcaattaacgaaggggcgtgctaacccgtacctgtttgttaatttccatggtaacgggttgacgcgccaagggatttggaagaacctgaaggcacatgttaaaacggctgggattgaaaaagacgtgaccccacatacattgcggcattcgtttgccactgtgctacttgaaaatggcgcagatctgcgaattgtacaagaattattggggcattcagatatttcaacgactcaaatttacacgcatattagtaagaaacatttgacagaagtttaccaacggagtcatccacgcgattaaattagatttgtcgcgctttataaactatggtagagttaatgctattagaactttgtttgatcaatggaggtcaacatgttattcaagtataaaaatgattatgaaaagattgcgatgggctttttatccttcgtaccggatttaaaagaagtcagtcatgtacaagctgaattggcgctctatacgtcggatgagcaacgcaatttatatttatggcgcaatgaagccggcgattttgccggtgttgtggggattgaactgggtgcggactatattttagtgcgccatatttcactgaacccttcggaacgtagcgacgagaactatttcaccatgttggatgaattagcggcgctttatcctgaaagtcgcgtgatgggttcgttagagactgcgccattgattgctaaatgggaacaacatcagaatacagaaatggactagattgaccaatgactgaacaattaacgttggtcttgactgattttgaaggaccactcgatttattattacatttaattaagcaaactaagattgatatttatgatattcccattgctgaaatcaccgcgcaatatcttgattacttgcaccaaatgcaagtattgaaactagatgttgcaggtgattatttagtaatggcggcgacgttgatgaagattaagagtaagttgctcttacctaaggcacctgaattaattgaagaagaaacagaagaatacgtcgatccacggcaggaattagtggaccaactattggcgtaccaagccttccaaaaggtcgcaacggttttgcaagagcgcgaattggagcgccaacagctctttgctaagccagctagtagtaatccagctgaaaaagtggtcccactggcgcgcggcgtgattaagccacgcgatttagcggccgcagtttctaaaatgttggtcgaagcccaagctaaacaaccggtcttcaaaacggtccaaaatgacgaaatttcgattacggataaaatgagttggattgtgcgtcatttagccgctcaaccagttgcttttgaagcgttggtcgttgttaaaacagatcgagatgaaatcgtcacaacatttttagccgtactagaattgatgaaggatcgaaaaattatttgcgaacaagccgactatgatgcaccaatcatggttcggttgaaggagggcatttcagttgaatcatctcgctgaaattgagagtttattatatgtcgcgggggacgaaggaattgcgcttgcgcaaattgcgcaacttattcatctcgatgaaccggcagtccgccagttattagaaaaattggcaaatcgttaccgcggcaacactgaatcgggtttgaacctgattcaagccgaagatatctataaattagtcaccaaaaaagaatacgcgacgttgttgaagacctattttgatggaccggtgtcaactagtattagtcaggccgctcttgaggtattggcaattattgtctatcgccaaccaatcacgcggattgaagtcgatgaggtccgaggtgttcaaagtagtggggccatccaaaccttgttagcccgccaattaattagcgaaaaagggcgtaaggatgcgcctggtcggccaattttatatggaacgagcacctatttcttagattactttggtcttgaatcgctcgatgaattaccaccacttgaacaattggcacttgacgctgatgtcgatggtagtgaaggtggtacagcagacttgtattaccgtcaatttgaacaaacgttaaatgaaacagatacgacgtcggaagagacgtccaaaggagaacaataaatggaacgattacaaaaagtgattgcaaatgctggggtagcttcaagacggaaagcagaaaccttaattgcaactggtcacgtcaccttaaatggtaaagtggtgaaggaaatgggtatcaaggtggatagcacaagcgatcatattgaagttgacggtgtgccgttaacgcgtgaacgcaaggtctattatgtcttgtataaaccacgccaagtgatttcagcagtgacagatgataagaaacgccgggtcgtcactgaataccttggcgatatcgttgaacgggtttatccaatcggccgattagattacgatacatctggcttattactactaacgaatgatggtgattttgccaacatgatgatgcatccaaaatataaagtcgacaagacttatattgcgaaggtttcaggattaccaactgcagatatgttgcgccaattgcgtaaaggaattgtcttagaaaaacgcaaaacagcaccagccaaggtcaaagtaatttcaactgatcggcgtaagaacactgccattgtaagcatcaccattcacgaagggatgaatcatcaggttaagaacatgctagctgcggttggcctacccgtaacaaagttgaaacgggaaacatatggtttcttaacgttagatgggttagtttctggcgaataccgtgctttgaaaccaatcgaagtcgcagaattcaaaaaaattgctgaactaaatgaaaaaccacagcataagaatcgaccaaaattatcacggcatgattaattagttgcttttggcacgttgatttgctatgcttatttcgaacaaaatattaatggttcgtcttcaggggcagggtgtaattcccgaccggcggtaaaagtccgcgacctgctacaatgttgattcttgtggtggctgaactggtgtgattccagtaccgatagtgaaagtctagatggaagaagatagggcttatttgggtatgaatgtatgcaagtaaggtctgttaatctccctgattaacagacctttttgatgcaatcagacttggctaagtccgctgacgaaggcaacctcatctggagggtgttagtaatgcaagtttcaaaagttcgtacgatgattggggtcgcaatgctaggggcaatttcatttgtcgtcatgtttttcgaatttccaattattctcgcatttccgtttttaaaaattgattttagtgacgtgattgtcctgttagggacgttcgtttacggaccaattggaggaatgggggtcgcattgattcgctcgacgcttcatttcattatgaccggtgctagcttaccgagtttggtcggcgactttgccggtgtcttggcgtcaatctgctacttgttaccattctattatttattcaatcgtcaatcgaacgttttagtaggtcaagcaattgctggtgttgcgggggctgtcagcatgacgatcttcatgtcatttgctaactggcttttcattttaccgctctatattaaattgatgggtttgaacttaggaatgtcgactaccaaatacattctatttggattagtaccgtttaatttaattaaaggtgcactcgtaacggtggtgtttgccgttttatatttacggattttaccatggctaaaacaacatatgcaaaaaccaattgccaaataaatggcagcaaaaaaggttgtgtccaagcgggcacaaccttttttataggacgtaaatatgctacgataaaaatggcgttgattggcgtacaatcgcaccagttggacaggcggtgtaggcggttttaaacgcaattcgttctttaggatcttcaattggcgtcgttccctgattatgatcgggtttaaaaaaggcgatcccttcttgatcgtaatcgaataagtcgggcgcctttagctggcagagaccgcaggcgatacagcgttccgggatgacttgactatagagcattaaattcacactttctcaataaaggacttaattgatgatgttaatggcgtatctactatgcttgttggcgcctgagaaaaggcggtatcaagcaatctactataccttaattggtaaacgaactacttcaaatctgtatgccggtttagcatatggattattaaaatggctccaaatttatcctaatctagaacaggcacaatttcaagcagaattaaaacgacttcagcaaaatggttggattgaaatcgatgagcggtatgtttggttgactgctaccgggcaacaaaaacaagctgaatggcagccgcaattagtttggccgacgcactatgaaggcccacagatgggtcacttaccccaattcactgctcgttttatgttggccgttcaaattgtgtcggaatatcatcatcaaaatacgcagtactatccattggaaacgagtatgaaggaccgcgtgttggtggtcagttggtttaagcggcataaggcaaccatcaattttagcagtcaattccagctagaattggcgcaattacttgaccagttagatccgcaacaagccgatcttgtggcaaatcaactgatcggacatcaagtcttgggcaaaagccaccaacaactggcgcaagccttagatagcccatccttgacagttcgtgtgcggaccatcgacgcctttgctcaaattttagggcttttattggcgcaccaaacgacttatccgctattgaatgaattagtggatcaggctgaaacgcaattgagtcagagtacgttacagacctggcaattgatccaacaaggggcgagtgttaaacaaatcagccgccagcgccgggttaagatcggaacgattaaagaacaccttttagaaaccgcgatgttactcccacggtttccgtttgaacaattcttaaaggatgcaactacacaaaaactagctagattgatgactgaacagccatcgctcagctataatgaagcacaaaccgcactccccggtctagatttctttgagtatcggctttatcaaattcaaaggcaggtgaacgcccaatgagcacggatgaactgatttataaaacgctaaaagagcggtttggctatgagacatttaagccaggacaattagaagtgattcaatctgttttggcgggccaagcgactttggcggttttgccgaccgggacgggaaaatcattatgttatcaattaccagcctatcttttgggccataccactgtcattatttcacctttaattgcattgatgcaagatcaggtcgcacagttgaattaccaaggtgaaaaaaaggcagtcgcgattaattcaaatttggaaccgcggcaaaagcatgcgttattgcgacaattgccacagtatcgtttcgtgtttatggcgcctgaaacgataagccagccggcggtcattcaagcactacaacaatgccagattgatttattggtcatcgatgaagcccactgtatttcacaatgggggattgattttcggccggattatttagtgcttgcgcaaatcaagcaccaattaaatccgggggcaacgctcgcactaactgcaacagctgatgcacaggttcggcatgatattttagccaagctagatttgcagtcggccaataggattattacgtcggttgatcgtcctaatatttacttaggggtgagtcaacaagcggatgaagcgagtaagaacgcctttttgcaacaattggtaactgagagtcaggggcccgggattatttatttttcaagtcgtcaaaagactgtcgagattgcggcttttttgcaacaaaagacagcgatgcgagttgcctattatcacgcagcgctttcgccacaggagcgcttcattattcaacaacagtttatgcaagggcagttggacgtaatctgcgcaacgaatgcatttggaatggggattaataaagccaatattcgctatgtgattcactatcatttaccgcaaaatatcgaaagttatctacaagaagtcggtcgtgcagggcgcgatggccaaccagcctatgcaatgttgttagcaacaccgcaagatacgtatctgcaacagtcgttagtgtcatttgggattcctgaagctggattgattcggcgtttctatcaagaaccgacattatttaaacaaagccaaggcaacgagtttgaattattacggcggtatcagcaaattgggatggatgaacaggccgttagtgaactgttacagaatcggcaaaaagaaaagcgttttgcgcttcaaacaatggttgattatttaaacttacaaggctgtcggcggcaatttattgtgaactattttgacgagcaaccccaacaggttgcccatgctgatcaatgttgtggtcaacaggattcaacggtctttttagaaaaatttaatttaaaaacgttaactgatgataaatcccctaaaatagacgggttagaccattgggacggtattttgaagcaattgttttagagattttctgggtattttaaaagggtctatggtacaatatcaaagaataccaatagggagggccgtcaatgctcaaagatgataagaaaaaattagataatcagacggaagacaaaccctgggaaagccagtttgatgatgatcgtgatgatcgcgggaatttatcgcgtgttgcttccaagagtaaggaaaaaggaaatacatattttgccattattctaggtgtattgcttgttttaatgattgcatttccgattattgcctatacgattcattctagccgggctaaccgcccagtcgagtctagtaagattgtcgttaatacttctgatagtgatagtgcttctaagaaagaagctaaaaaagcgaagtctgctagcgaaagtgctaccaaagcggccagcgaaagtaaagctaaacaggctgaaagtgaaaaagcggctagtgaaagccaagcagttgaaagtagcaaacaagctgcagaagaagctgaaaaggctaatagtcaaagccaagctcaagcagacgctcaaaatagtagtagcgaagaaacaacaactgaaagtagcagttcaagcgaaacaacgggtggttcttatacgttgaaagccggcgaaggtttataccgcgcagcggttaataacggtttaacactcgatcaactacttgcattaaaccctgggttaacagccaattcacaagtggcaccaggcacagctctaaaagttaaataatcagtactaccaaaaggcctggggaaactcccagccttttttaatgattttttcaggaggcagaacatgcaaattgcaattgatggaccagcatcatctggtaaaagtacggtcgccaaaattgtggctactaaattagggttcgtatacgttgatacgggtgctatgtatcgcgcatcaaccgtgttagcacagaaattagggttagacttcggggatgaagcgggaattttagcagctttaaaagaagcagatatccaatttaaacctgaccaagcagggcaaaaagtcttcttgaatggtgaagatattacattagccattcgaacccctgaaattacgaataatgtctcacaagtatcagctttagctggtgtgcgcactgagatggttgcacggcaacgtcagattgcagatcaaggtcaagtcgtcatggatggacgcgatattggaacaacggtgttacctgctgcgaaggttaaaatttttatggtggcaagtgcccaagaacgagctaaacgccgttatgctgaaaatacagctaaggggattatgacgcctttagcaacgctacaagcagagattgaattacgtgatcaaaaagatagtacacgggccatttcacccttaaaaaaagctgacgacgccattgaaatcgatacaactcagttaacaatcgatgaggtggtcgacacaatattagcaattgtaaagaaaaatatgtaattttatctttgaacgaggtaaaataactggtaatccgaatagatatcaactaaaatagtaactgtatagatagtcgttaaggaggattttagctatgagtgaagctaatttgaataacacccaaagcagcgatgcaatggcagctgctttagacagtgtccacgaagtcaaaattggggacgttgttaaaggtgaagttttagcaattgaagatcgacaagtgattgtcggcatcgaaggaactggtgttgaaggggttgtgcctcaaaaagaattatcaagtcaacctattgaagacatcgcagacgttgccaaagtaggcgaccaattagatttagtggtcatttcaagaatcggtaacgataaagaaaacgggagctacttattatctaaacgtcgcttagaagcccgtaaagtttggtctgaaattgaacaaaaatttgctaatcaagaaacaatcacagctaaagtcatcgacgtggttaaaggcggcttagtcgtcgatgctggtgtccgtggcttcgtaccagcttcaatgatttctgatcgtttcgtacgtgatttaagcagctttaaaggccaagaattaaccttacaaattattgaaattgaaccaagtgaaaaccgtttaattctttcacgtaaagcattattggaacaagaacgtcaagctaagttacaagcagtttttgaaaaaatgttacctggggatgttgttgaaggtgaagttgctcgtttgacaaactttggcgcattcatcgatttaggtggcgttgacggcttagtccacgtttctgaaatttcatatgatcacattaaccaaccttctgatgtcttagaagttggtcaaaaagtgcaagtgaaagtcttgagcttagaccaagaaaaaggccggatctcattatcaattaaagatacgcaacctggtccttgggatgatatcgctgataaagcaccagttggtagcactttagaaggggtcgttaaacgtttaacaacatttggcgcctttgttgaagtcttccctggggttgaaggtttagtgcatatttcacaaatctcacatcaacatatcgccacaccaaacgatgtgctagaagaaggccaaacggttcaagtcaaggtcttatcagttgatcctgaacaacaacgtttaggtttatcaatcaaagcattgcaagaaaaacctgctggtgctaaggattcagaacacaaagatgtggcgccttctgactatgtgatgccagaagaagaaacaggtttcagtatcggcgacatgcttggtaaaacattagacgataaataatttttttaaaagttatatgcaaaaaggtagggtctgggacaaaactaggttttgtcccagaccctacgtttatgtcggtgattgattagtacgacgcagaggaagcggaagttcagcggactttgtcggagtgaccttgtcagtttggctcagacagggtacactgaacaacgaagggaatgaatacaatgacaaaaccagttatcgccattgttggtcgacctaatgtcggtaaatcgacgatttttaatcgcattgccggtgagcggatctcgattgttgaagatacgccaggggttacgcgtgatcgcatttataccacaagtgaatggttagggcatgaatttagcctaatcgataccggtgggattgaaattagtgacgcaccatttatggaacagattaaacaacaagcagaaattgcaattgatgaagcagacgtgattatcttcttagtgagtgcacgagaaggggttactgatgcggatgagcgagttgcacaaattttataccgcgctgacaaaccgatcttacttggggttaataaggcggataatccagaacaacgccaagatatttttgatttctatagtcttggctttggcgaacccatcgccgtttcaggggctcatggtcaagggttaggtgatcttttagatgccgccgttgctaagttcccagctgaagatgacgaagaagaagacgatagcatcaagtttagtttgattggccgtcccaatgttgggaagtcatcacttgtgaacgcgatgttaaaagaagaccgggtaattgtctctcaaattgaagggactacgcgggatgccatcgatacgaagttcacggctgaagataatcaagaatttaccatgattgatactgccgggatccgtaaacggggtaaggtctacgaaaatactgaaaaatacgccgtaatgcgtgcattacgtgcgattgaccgttcagacgtcgtattagtcgttttgaatgctgaagaaggtattcgtgaacaagataagaaagtggctggctacgcacatgaagctggtcgtgggattatcatcgtggttaataagtgggatacacttaaaaaagacaaccacacgatgaaagagttcgaaaatcacgtgcgcgatcaattccaatacttagactatgcgccaatcatctttgtatcggctaagaccggcgttcgcttgcaaaacttgccagcgatgattgaacaagtgagtgaaaaccaaaaccggcgcatccaatcagcactcttaaacgaagtcttgatggacgcaacaacggtgacaccaactccagctattaatgggaaacgattgcgcatttattacatgacacaagtagcggttcaaccgcctacatttgtggtcttcgtaaacgatgttaacttgcttcatttctcatatcaacgtttcttgaagaatcaattacggaaaacctttgactttactggtacaccaatccatttgatccctcgtcaacgaaaataagctgttttttcaaaaatccgctaatatgattaactaatttgctcagaatgctgttttttagcgaaattccttgctatcactaggtttgtgtgataaattaaaaaatgaaatggtgatcaaatcattgtttcgtcatttttgaccactcaaaaatggtttcggtaattaattactgattatctgtgatgagcaggaggtgaaaaacatggcaaacaaagcacaattgatcgaaggcgtagcatcaaagactggtttaactaagaaggatgcaactgctgcagttgatgcagtatttggttcaatccaagacactttgaaaaaaggtgacaaagttcaactaatcggctttggtacttttgaagtacgtgaacgtgcagctcgtaagggccgtaacccacaaactggtgcagaaattaagattcctgcaagcaaagtacctgcattcaagccaggtaaagcattaaaggattctgttaaataagaattcaatttataggctgggatttttcccagtctttttttattggcaattaatccgaatatgttaaaatggaacaatcgaaaaagggtggttaaatgacgaattcagaacaaatgcttacagcattagaagataataatttagaacaagcacagacttacttccaacaagccttagttgctgatgaacccgatacgctctacagcttagctgaagagttatatgcgatgggttttttggaacaagcaacgacaatttaccaacaattgttggcccaatttcctgaagaagatcaaatcagaacaacactagcagatattgcggtcagcaatggccaatacgacgacgccttgaacttgttggcagatattacgccagaatccaatgcgtacgccgaaagtctgctgacggcagctgatgtctatcaaacaatgggcttaccagaagttagtgaacaaaaattattgacggcgttgcgcctatatccagatgaacccgtcatgcaattcgcattagctgaattgtactttgaaatgggtgaatatgtgaaggccgccaattactatgagacgctcatcgaccaagacgttgttgaactgggacaggtgaatattcaaaagcggttggcaactagttatgccagcagtggggcttttgaagaagctttgcagatttacgaagggttgacgccagaatttctaacagaagacgatcaattccagatgggctttttgtacttacaaattaaggattatcaaaaagcaattgaaatcttaaccaagttacagacgactgatccacaatatacgtcactatatacttacttggcagcagctcaagaggctcagaatcaattagaagacgccttaacgaccgttcagaccggaattgggtacgatgcctacaacgaggtcctctatcaaaaggggagcgatctagcgcttcaattaggcaataacgaggttgctgaacagatgctaaacgaggccctcaagattgatcctgataatatgggcgaaattagtgccttgagccaagtttatcgccgtcaaggccgccatgccgaaaacattgctttcttacaagatgcgattgaaaatcataaaccaacggctgatttatattggtcattggcgcaatcacagatggcggtggatgatgttgaccaagcgcgcgaaaattatctgttagcttatcctgacttgaaagataactcggactttctacacgatttaattttattcttccaagaaatggcacaggtcccagaaatgttagcggccctcaaacaatatttgaagctcgtgccaaacgatttagagatgcaaactctctatgacgattaccaagccatgcaataatgcaaaaaaacgcccgactattactttagtcgagcgtttttttgcgtctttagtcgcgtttcttccccagatgaaagtggtacattgaagaggaatcgggaacaggatttatttggggaggtttttaggatgacaaacacaatactttcggttgcccaactaacacaagtggtgtcaattgggcagtctgaccagacgacaaccttattgaaaaatatttcgtttacggtgcaaaaaggggagttggtcagtattgttgggccttctgggtctggtaagagtacgttgttgtattgtatttcagggattacgcgacctacaggcggcactgtggcaattgcggggattaatccgtatcaattgaaacccaatcaactagcggcttttcgcagacagacgattggctttatttttcaacaatacaacttgattcagtctttacccgtctttgaaaatgttgtcttacaacagcgcttgagtcatcagcaaccgcaacgtgctgagattaaacagttactgaccaaaatgaactttgcgggacaaatcgatgggcctgttgcgactttatcgggtggtgagcaacaaaaagtcgcgattgctcgcacgattctaactgattgtgatgtgctatttgccgatgagccaacgggtgcgctagattcggcatccaaagcgattatttttacatatttcaaagagatggttgctaaagggagaacggtgattatggtgacccacgatattgagctggctagtcagacagatcgtgcgattgtattaaaagacggtcaggttcagcaaattgtgactgaaccgacacttgcgacaatctatgccgccttggatcaggtggtgtaagcgatgtggacaatcagttggttacagttaaagcattcctggcggcaatggctagcaacaataccagtttttgtaacagtgggtttaatcctcggtttttgtttaacgggaattgtgaatgtggcacagtcgcagcaagttgatctatacggtccgaatacaccgttgccgatttttatcatgccggtattttttggtggtattacaatggtaatcgtgattaaaggaatcgtgcaccagcttttggatcagtttaaaacggactatcgaatgcttgcgattctaggggcaacgatcaatgcactggccgctattttggggatttaaatcggaattgtcagtggggtgagtgctctgctcggcggagtcgttgccttgccactaacgcgtttttgttatgcgtggttgcagcagattgttgggccccaaatgttgccgaatatgccaattcatttttcgttcttggcacttttgttaacggttgtcttggttagtctaattgccggtagtggtggtttttggcatgcacgccatcaactaaaagatgggaataagcatctcagtcaccgacggcggatcgttcgtagagttaggacgattgtttcgttaatggtcgtcagtgggttaattattaaactaacgatgcaaagcatggcgttaacctatgtcggtcattccgagaaagcaattggcagtctcggcaattcggttggcaacctgaatctcgtgttgttcttattattaattctaattgcgcttaccggacacacggtattaaaattaattagccacgtgctctattggttaggtgctagaacgctctttttgaacatggcagcccatgatattgactatactgctgaaaaatatttgccgttgtatacgccagtgacggtcattgcggttttaattacggggatgtcggcaattatgtggaatataccggcctatacaaataccacgagtgccaacaatgaacgtttggtgaatttcattttgacaattggtttatatttgggcgcgccgttactgattgtattagcgaatgtattggcgacgctgttagtcgcaaaagaggataatgcccagcaaatgcgccaattacagttgctcggtttaacaaaacagcaactattgctgacacaacaatcgcatgcagtgatcttagttggtgtttgtcttgcagtcagcctactagccgggggcttagtttggagcctgacgattcatgtcgggcgaaccattttgtaccaagcacccatctcaatggcggctttgctcgctggaccgtttttaatggccgttagtatgctttgcctgctaacgatagttaatttagctcgtgtttattgtgggaaatgtttaactaaagcataaaaaagacagctagtgcatttttaagtgcattagctgtcttttttattggttttgattgcggttaagaatgtcctgcgcccacgcgcaccattctaattctgttgcgcagaccattaagcgccgtttcaaaatcaggtaacgacctaagtttttttgcttttcggtgggatcggttatgaggttgtattcttgcatcttatgttggtattgtttttgaattttttggtaatgatggcggcgatcttggagtaagtcagctgcttgttcttgattgaacagtgaaataacgtaaacttttgctaaaaactcgtcacgttgtgtgggtaaattcgtttcttcttgaaaccagtcagtaacgacgagttggccggcttctgttaaatgataaatcttcttttgtttatgaacgggatcaattttaaccgtgacatagccttgttcgtgcagtttatttaatgccgtgtagatttgactgtggtgtgcttcccaaaataaattaatgtactgctttaattcgtagccgctacacggtttgcgaactaacatacataataaaatatagctaagcgtactcatattatttcaccctttaatcgattaattattgctcagtataccatatttagagtcaacaaacatgtcactatattatgtcaaattttaatgtaaaaattgatatgttttgcaatctaatgtagtttatataaagagaaagagagtgatatgttgctggagaatcaaaataaagggctacgctcggcgtatgccgttgcatttacgtgtatggttgcatttatggggattggtttagttgatcccattttaaaaacgattgcggttaaattaaatgccacaccagcgcaaacgaccttactatttacgagttatatgttggtcacagggattattatgctatttacagggtttatttccactagaattggtgcgaaaaaaacgattagtattggtttgatcattattgttttatttgcggcgttagctggtcgttcacagaccattacgcaattaatttcgctacgggccggttggggctttgggaacgccttgttcctatcaaccgctttgactgcgattgtcagtgtgatgcctgaaaaaacggaacaagcgattatgttatacgaaggatctttaggaattgggatggccgttggaccacttgtgggtggcgtcttagggagtctttcatggcgttttccgttttatggtgtcgccattttgatgtttattgcggcgttgaccatcatggtttcattagaaccgattgctaaacctgctaaaagggcgcctttttttgcaggggctgtcgcgttaaaaaatcatcgtttacgttcaatcgggattattgcattattgtataatttcgggtttttcacgattttagcgtatgcaccattcttattagttgggttaactgaattgcaagttggttttgtctttttcgggtggggcgtgatgttagccattgcatcggttttcattgcaccacggatggaacaaaaaacgaatacccttgtgacgttgttgtttgggttaagctttttcttgatctgcttaatggtgatcggtatttatgcagatcaaccagccttagtggcctttggcgtcatcattgctggtttcttccaaggcttggtgaatacgttgttaacgacggttgcgatggaaaatgattcgattgaacgcagtgttgcatcatcggcgtatagctttattcgctttactggcggggcaatcgcaccatttgttgctggtaaaatcgctgagaaatggtcagcgcattggactttttattttgcgagcttaatgattttaattgggattttctttgttctgcgcaatcaaaaatattttgtgatggttgaagaagttgaaaaagaaattgagttaactgagggacaggaattatcataaagacacttaaaaacgccagcgattaatcgctggcgtttttattgattagtcgtacgtaaagccttccccgagtgcttcgtgcacatcaataatggaaacgaatgcgtgcgggtcatgttggttaatcaaccgtttaagataggcgatttcacttggactgacgacacagtacagcattggtcggtcttgatgggcataagcgcctgtggcctgtagaaacgtcacgccgcgttccatatcggccagaatgtcatcggcaattgcttgcgcgtggtcactgattacgagtagccctttggcggcgtaagcaccctcgagtgtgaagttcacaatccgggagaagacgtaagacgcaattaaggtatacatcatatgttcgatatcgaggtaactgagtgagagtgttaagactacgacgtcaaaaagaaggagggagcggcccattggcatccctttttctttttcgataatgcgggcaatgacgtcggtgccaccagttgtgccaccgaagcggtagataatcccactgccgaagccaccacataaaccggctagaatagcggcgattaaaatatcgtggtttaaatcaattgtgatggggacacgttgccaaatccatagaaaaacggacatcatcgccgttccgtaaatcgtgtaggcgagtgcgcgtttaccgaggtaacgatagcctagaataattagcgggatatttaacaaagccgttgaatacgccgggtcgatatgcaaccaataccgtaaaatcaaggtaatcccggttaagccaccttcagccaggtgattttgaatgttgatggtcactagcccaaacgcgtagatcgcacagcccagcgcaatcaccgctaaatcacgactagtcgtttgccaagtatgttgtttcgtcatgtcaacgccccctttacataacttaaatatagcacggaatgggggttaaaaacagttggaaccactttggtggctgaagtggggtccttgattgtggtatgataaatagcatcagaaacagttaattgttagataagagggatagccatgaaagtaaccacctttgcgccggaatttgaagcggccctaccaatcttaaaacaaattgaagcggcgggttttgaagcctatttcgtcggcggcagtgtccgcgattatttattaggcttgccgattcacgacgttgatatcgcaacgtcggcgtatccagcagaagtgaagcaaatttttaaacgaacggtcgataccggaatccagcacgggactgtgatgattcttgatcatgggactggctatgaagtgaccacttttagaacggaaagtggctatcaagattttagacggcctgattcagtgacgtttgtgcggtcgttagccgaagatttacaacggcgggatttcacgattaatgcgcttgcgatgcgcgctgatggtgaaattattgatttattcgatggcctgaccgatctaaaagcgcaacaaatcagagcggtgggcaaagccgacgaacgtttccacgaagatgcactccgtatgatgcgtgccgtccgttttgaaagtcaactcggctttgcagttacaccagaaacacaaactgcgattgccaaacatgctgaactattaacgaaaattgcggtggaacgcattcatgtcgaatttgtgaagttgctacaagggattcagcggcaaaatgggttacaaacctttttaaaaaccgggttgtatcaatattgtccagcgttcgcgactgaagcagcgggactgaccaaattagcggcattaccagcgcaacagattcatgatgaagatacggcttggctactagtcaatgcattattgggtaaaacccccgccgccgccggcaaattattgaaacgctggaagagtgctaacgatgtgatcgatgcggttaaagcaggtttgggattattgccagccattctagaccaatcagccgatcagtgggccctttatcaagcggggcaacatgtattagacatcacgttaattgttgcccaattaatgaccaacgaatcagtcgcagttgatcagtggcaagcaaagtatgcggcactgcaaatcaagcaaaaggcggaactcgccatcaatggacaagtcttaatgcaaaatgggtatcaacctggtccgcaactaggaaaaatgttggcgcaactcgaaaaagccgtggtgttagatcaattaccaaacgatcaagcccaattattgcaatcggctgcacaaaactaagccattccctcagaaggtgtgttaaaataaccatgtaagcacattcggaaagggtgacaattgatgacacaacatgtttttaaggaattgaaattttattttagaaatggtgacgcttggaccgtcagccacaaagaattaaatgatatttggattagccgtgttaccaccagttatggtcgcattaatggtggcccaatgcaagagattcacccttgcaagagtttcaaagccgaaatcttacctgaagcggatcatgtgaagtccgaagacatcaacaccggttctcttgaaatggggatgttcggtcgtgcaacgaagtatcaagacatcgaaaaactcgatttaatctttgaagatgatcaagatcgcgcaccaatgcaaatttatttcccattcaagaataaagataatagtggcttagataatatttatcaaagtagccaaatctcacaaaaaaatggtcggttgtacattgtgattgatgcagaacacacaattgcagatatgtaccctgaaatttaaacgttagctcctgacaatattgatcgttgtcaggggcttttttatttgtttacagtttacgacattctttttgtcattttgattgtcagtcgtctgattattcgctatgattgatggtaacgaaagtaaaaaggtgactatattgcaaacattgacagcaacgcatttaacgaagacttacggcgaaaaaacgctttttgaagacatttcatttttaatccgtgaaggggaccgcattggtttagtcggcattaatgggaccgggaaaacgacgttactcaacgcgattaccggcatggattcatacgatagcgggcaggttgaaacgcctaaccaatacgcgatgagttatttagcccagaaaccaagctttgatacgaacttaagtattatggcggcgatttttgccggcgataatccggttttcaagacgattcaaaactatgaacgcgtcttggcggcatatacgcaagatcccactaatccgaagttacagacgcaatacgaacaagctgatgcgcaaatgacgcaacaagatgcttggacggttgatacggatatcaagacgattttgacgcaattacatctaacggatttggatcaaccgattaatacattatctgggggccaacaaaaacgggttgggttggcacaagccttaattgaaagcccagacttattgattttggacgaaccaacgaaccacttggattttgattccattgaatggcttgaaaaacgcttagcacaatatcaaggcgcgcttttaattgtcacgcatgatcgctacttcttggatcgtgttgcgaaccaaatttttgaactcgacggtggtcaactctattcatataacggtaactatgaacaatttttaacccaaaaagctgatcgcttggaacgtgaacaacaagctgcccataagcaacaacaactctacaagcaagaattaacgtggatgcgcgcgggtgctaaggcacgaacaaccaagcaacaagcgcggattaatcgcttcaatgacttaaaggcgaatttaaccactggaccagacgattcggaagtcgatattcagatggggcaatcgcggttaggtaaaaaagtactcgaattaaagaacgccagtttaaaactcggcgatcgtcagattttggatgactttagtattctagttcaagcgaatgatcggattgggattagtggcgtcaacggggccggtaaatcatcactgttaaacgtgttggctgaacgcctcccacttgatagtggcgagttaattgtcggcgaaaccgtcaacctcggctactatacgcaacaaaatgaagacttagatcctaacaaacgagtgattgcatacttgcaagaagccggcgaagaagtcattggtaaaaatggggaccggatcagtgtcacacaattgttagaacaattcctattcagccgtcaaatgcacggcacattgattggcaaactttctggtggtgaaaaacgccgcttgtacttgttgaaaattttgatgcaacaaccaaacgtcttattactggatgaaccaactaacgatttagatattggcacgttgacgattctggaaaattacttggaaaactttaacgggactgtgatcacagtttcgcatgaccgttacttcctcgatcaagttgccgacaaactcttgatttttgaaggggccggcaagattagcaccgaagttggcctgttcagcgattacttggcaaaacaaaaagcaacaccaactaagtcagcgcctaaagcagcgacagcatcggttgaagaagcaccagttgcaaagaccaagcagaaattaacatacgccgaacaaaaggaatacgaacacatcgaagccgacatggaacaattggacgaacagattgaaaccatcaaagcagaaatgaacgcaaacggcgcggactatggtaaattagcagagtggcaggcccaaatggatcaacttaaccaacaactagacgaaaaaatgacccgctgggaatacttaagtgaatacgcaaactaaatgagtgcgttcaaaccgggtatattccgagcactagcctaacaaggcgaatgattgctgaaagcaatcgtttgacttgtgtagctaaacgcaagaacatggttttaaaagcacgttaaaaaactgagtgcgtttgaaacggtttgacgctgagcattaacttaatttggcgaattagcgatgtaatcgctgatttgacaaatgtcgttaagcgcaagcgccagtttcaaaaagcacgttaaaagaagtgcgttcaagcttgttcaacttttaagcattagcttagtgtgacgaataagcgacaaagtcgattatttggcatacgtcgctaagtgcagaaagttagcttgaaaagcacgttaaagaaaggaatccacatcatgtctgagcaaacctacttagatttagcacgtaccattttagaaacgggtcactataaagaagatcgtaccaacactggcacctatagtctgtttggctatcaaatgcgctttgatttaaacgaagggtttcctttattaaccaccaaaaaagtgccattcgggttaattaaaagtgagttattgtggtttttaaaaggtgattccaatattcgttacttactacaacacaataatcatatttgggatgaatgggcgtttgaacgttacgttcaaagtgccgattacacaggcccggatatgacagattttggtcatcgtgcccaaactgatgcggccttcaatactgtttatcgcgaccaaatgcaacagtttaacgaacggattttagacgatgaagcctttgccaaacaatatggtgaactgggcgatatctatggtaaacaatggcgtgcttggcaaacccgttctggggacacaatcgatcagattaaaaatgtgattgaacaaattaaaaccaatcccgattcacggcgcttaattgtctcagcttggaatccagaagacgtgccaagtatggcgttgccgccttgtcatacgatgttccagttctacgttaatgacggacggttatcgtgccaattgtatcaacgtagcggggatgttttccttggcgtaccatttaacattgcgagctacgcattattgacacatttgattgcgcatgaaaccggccttgaagtcggtgaattcatccatacgttgggtgatgcccatatttacagtaatcatattgaacaggtgaagacacagcttgaacgcccaattcatgccgcaccaaaattgtggctcaatccagataaaacaagcatctttgattttgatgtcgccgatattaaacttgaaaactatgaagcagaacccgcaattaaagcacccgttgcggtttaatgaggaggagcgccaatgttagcattcttatgggctgaagatcaaaatgggttaatcggtcaaaatggtcacttaccatggtcattacccaacgatcttgccaattttaaacacgaaacggttcatgaagtggtggtaatgggccggaaaacgtatgatagtttacccgtccaacccttacctggacgccaaaacattgtgattacgcgacaaccggatttagctgtggctgatggggtgtttgtgatgcacaccaaagcggaactgcttaaatatgagcaagccaacccgatgaaaaagatttttatcattggtggtgccgatatttttgcaatgtacgccgatgatgtcgattatctgtacgttacaaaaattgctgaatcgtttgaaggcaacgtttatatgccaaaattagcgatggatcagttcgaattgatcagtcaaacacctggtgtggtggacgaacgtaatcgctatgcgcatacgtttgaaatctatcaacgccgttagaaagattcaattaagggcggtcgcagcgatgtaaccgcctttttgcttgctacaaaagtgacaactggctttttttttaatcagtaacttttggtgaaaaaagcgtgattgtttgatatactgtcaatagacataatcatagaaatcacggggccgttgattgcccagatttcaagatagaaagcgtggctgaagtaatagtggctaatattaaaattgtaacggattcatccatccaactcactcctgaagaaattaaagaacatcatattacggttattccgttgacgattatgattgacaatacggtgtatatcgatggtgaaaccattacccgcgatcaatttatgactgaaatggcaagtgcgagtgccttacctaagacgagtcaacccgcaatcgggaattttgtcgaaacgtatgaacaattagcggctgatggcagccagattttatcaattcacatgctacgagcaattagtggcactgttgatacagcccgccaagccggcgagatggcgaaagcagatgtaacagttgtcgatagcgactttaccgaccgtgcaatggcattccaagtgttaaaagcggcagaagtcattgaaaacggcggtagcatggatgatgctttagcagccattcaaaacgtacacgatcatacgaagttatacatgggtgtgactgatctaaccaacctcgttaaggggggccggttgagtcatgcggctggtgtgatttcaagtttattaaatatcaaggtgatccttgaagtggctgatagcgaattaaaagtgttacgcaaaggccgggggatgaagaccattacgaaattcatcgatgaaatggaagctgatatgcgcgacttaaagattcgggcaatcgggatttcacatgcggatgggctagaattgagcgaaaaaattaaagcacaattgcaagtagtattcccaaacatcgaaattcttgtccggacaactgatccagtgattgcaacgcatgcgggtgcaggcgcatttgccgttatgtactacacagaggattaacaagattacaattaatgcattaacacactaaggctggttgacatttaattgtcccagccttaactattatctagaaataaccgaggtgtcacgtttgaagaaagcacgacagattttaattgatttaggcttatttgctggtgcgattttagtggtctttattatctggcaactattaacgccacggcccaaccaagcgcctaagacggtaacatcaacgtcttcagcggataaagtgatcaaatcaaaaccaaaaccaaaaaagacgttgcagttggttgcgattggcgattcattgacgcatggtgttggtgatgagaccaacaaagaaggctatgtgtcattagttgccaatcagattcagcaagcaaccaagcatcccgtcaagaccgccaatttcggtgtgacgggcgataccagtgtacagattactaaacgcgtgcagaaacaaaagccgctacagcagcaattggcaaaagctgatattgtgacgctaactgttgggggcaacgacctaatggcagttttacagaataatttttttgagctgaatcaacgtcggattacgactggtcagcaaaaatatcaagcgaatttaaccacgctgatgatgcaaattagaaaatataatcctgatgccccaattttcatcatgggggtctacaatccgttttatgtctatttccctgaaatcactgggatgtcaaaggcggttgctgagtggaatcagaccgccaaaacggttgctaatgatttcaaagatacgtattatgtcaatagtgatcggatgttgacacggggcgatgggcattttgtcaaacagactaaatcgctcgctaaaatggatagtgcacagttgcaaaaaacattagcggctaacgagcatttgaacccctatatcagtccagatgatcatttccatcccaatcataaaggttatcaatgggtcacaaaggccttttggcaagtgatgaaagcacacaagcaaacgtgggattagagaaaggataggttatgacaaccagacaagcacatcaagcagcacagaaaacaacaactaaacggaccatcaattattggaaatacagtttcatcgtcttattagcagtcgtgatcgggacagttggtcttgtcggctacaacgtgacagcccctaagactgaaatgattaaaactgagaaaatcatcaaagctgatagcacttttgaaattcagatgcataagagacaaatcaatagtttagtcacctattatttacaaaactacttggaagattcaaagattaaataccaactcaccctggatcagcaggcgattttatctggtcaattcaagttcttagggtttccggtcgaattcaacctcttttttgaaccgtacgttttagaaaatggcgacgtccaattacgcgccaaacaattagcagtcggacaattgaaggtgcccatgtcgtttgtctttaattacatcaagcgtcaatacaaattccccaaatgggttattttggatgcacacaagagccggattacattacgcctaaatgagttcaagctcgaaaacgggatgcaagtaactgctaaacatatcgatttgaagaatgataagattgatttaaacgtctatatcccgctaaaaaataagaaataaggtgttcagatgaagcagagtttttatcgttacctcatgacccaacgtgatccgaataattatgaaccagttccccaatttgccaacaatgccttttttgaccaatctttccctaaacaaagcggcgattatgaaacattaacgcgctatttggaacttaatggcagctacctcccgagtatgacgatttttgatgaggcgtatgaagcctatcaggaaagcgaacaagcctaatgacttccccgaagcagaaattgtggcggggatgggccattaccggctattggcttctcgcatttttactggctgggacggtagcgattgtgttacggtcgttcattctggtccccgcatcggtgtcagggcaatcgatggccccgacgcttgagtcagcggaccaactcttattacgcactagtgggcccatcaagcgctttgatgttgttgtcttcacccgagctgatcaaacaacttatgtgaaacgggtgattggtctgccaggtgaaaccgttgcataccgcaatgaccagctgtacatcaatggacggcatgtcgacgaaccattcttgaatcaggccaaaaagaaaccagggattttaacatcagattttgaattaaaaaccttaatcggcgaaaagcagattccaaaagatgagtactttgtattgggtgacaatcgccagatcagcaaagatagccgtttgtttggtacgatccaccgcgatacaatattaggccgagcagtggcggtctactggccgattaaagatatacaatctttaaaataataattaaaagctgacatactctagagtgtgtcagcttttttgattatcgagtgctaatgatcgtatgaaatgtactgaatatgatgcttaactgaaaaaatgatacgcttaattggtggatgttgtagtccggaattaaatttaacccgtcagccagacatcaggtatgatagaattaagaataatacaatcagtgacaaatattaagaatgatgtatatcgcttaactagcaataaaggagttattatgacaattcaatggtatccaggccatatggcaaaggcccaaaaacaaattaaagaacggctcaaagcagtcgatttgattctcgaaattgtggatgcacgggttccagaatcttccattaatccgatgattgcagaacttggtcaaaacaaaccgacgctcttgattatgaacaaagcggatatggcagatgccaaacgcacacaacaatggattgaaacatttaaaaaacgggggattacagcaatcgcgcttgatgcgcaacataaatcaaaattaccgcaaatcgaaaaagtagcacaagaaattttggcagacaaacttgctaaaaaacgggcaaaagggattcttaatccggtgatccgtgcaatgtgtgttggggttcctaacgttggtaaatcaacgattttgaatcgcttggtgcaaaaaaacattgcggtaacaggtaatcgacccggtgtaaccaagaatcaacaatggttaaaagcgggccaatcactcgaattgttagatacaccaggggttttatggcctaaattcgaagatccagctgtcggcaataagttggccttaactggttcgatttcggatgcaatttatcacccggatgatgttgtggtgtatgccctcgattatttcaaggatttctatccgcaacaattggtaaaagaataccatgtgacgccggctgaacttgaaatgccagcgcctgatttaatcatggcattgaccaaacgactaggttttaaagaagactacgatcgcttctgtatgaaattcatcacggacgcgcgtaagggtaagttagggcgctttacactcgatatcgttcctgtggaggcgcactaatgaccaaaccagaatcaattgctgccattaaggcacgcttattagacgacatttcagaggaagaagtggcgctcttacgcagtgatgcgcgtgctggcgtgcagaagttactcgttcaatatgacaagcggatggctaagttagcggcgcaaaaagcggcgtttatcgaacgacgccagctagaagaaagtttatggccagattatcccttgattgctggaattgatgaagttgggcgcggcccattagcgggtccagttgtgacagcggccgtcattttgccacatgattttgacctatggcaagtcaacgactctaaacagctttcgtttaaggtgaaacaagaactgtatcgcggtatcatggcacaagccatcagtgtcagcattgggattgccgatgcaccacggatcgaccaagagaatatctatcacgctacggaactggcgatgggcgaagctgtcgctagtttagcagaacaccccgattacctattggtggacgcaatgaccgtgccgacagacatcccacaagaaaaattgattaagggggatgcgcgcagtattagtatcgcctcagccagtattgtggctaaagtgattcgggatcaattgatgattaattatgatcaacagtatccgggttacgatcttgctaataatatgggttacgggacagcgaaacatctcgctggtttagctgaattcggtgttacgccaattcaccgccgcagtttttcgcccgttaaagacgccctatagaaaataaaacagctcctttacgaagataaacgtaaaggagctgtttttttgtgttgactaaaaagcaattattattgaaagtacacctggcagatgggtttggccccatcagtgaattacgcttagccgcatggttagtaacgagtcacaattgggctttatcggcattggagattgcgcagattgcgtgtttaccggagcgatattggctgacctttcagactagttttgacagtctagctctgcaacagaagtgtgccacgcatgaacgttatgttcagtatctgacgattctagaagcagattatccgcaacggttgttagaaacccattgtccgccaacagttttattttatcgcggcgatttaagtgttttgaaacagccatgtgttgcggtggttggtgcgcggcaagccacggagtatactaagcaagccctgcagcatttattgggattaccacaaacaacgacgattatcagtggtttagctcaaggggcggatgcgatggcgcatgaagttgcactccaaaaagggttacgaccgattggcgtgattggaacgggcttgaattgttattacccaccacaaaacgaacacttgcaacaggcggtcgctgaaaaagggttattgatatcagaatacggtttggacgtaacggctaagaagcaccacttcccagcccgaaatcggattattgccggactttgtcatagtttagtggtcacagaagcccgccaaaaaagtggtagcttaatcaccgctaatttagcattacaagccaatcgtaacgtatatgccttaccgggccaggttaatcattcattatcggcaggctgtaatcaactgattttagccggtgcaacaccgcttttaaatcaacaattgttattggacgagttgcattattttgattgagggttaattgttgacaattctgcggcatgttgttaatattaaagtcacaagttacttataaagtaacaaatggaattcaaaggggatttttaatatgaaatatgcaattacagcagtgacaggtcgttttgggcaagtcgcaatgaagacgttggctgacttagtgccagcagaacaaatcattggattagcacggaatactgaaaaagccactaaaatggtcccagctggtgtgaccgttcgtcccggtgactataacgatgttgccacattaacggaatcactcaaaggcgttgaccggttattattcatctcctcacaacctggtggcgatgtgccccgtgcgcaacaacatttaaacgtgattgaagctgctaaaaaggctggcgttaagtggattgcttatacgagtttcccacacgctgatcaagcaacaggtgctttagcaagtgatcacattcaaactgaaaaagcattggcagcatcaggcattgatcatacattcttacgcaataactggtatcttgaaaacgaaatggatagcattaaaggcgcattagcaggtcaaccatttgtttatggcgctggtgaagggcatgttggttgggcactcgaacacgactatgctgaagctgcggctaaggtattagtcaacgatcaaccaaaagcgatttatgaattttccggtgcgccagccacttatgcggatttagctcaagcgattagcgagttgactaatcaagaatttaaggtagtatcattagatgcggctgattatcgtcaaagcctcgaagacaacggcttacctgctgaagtcgctgaaattgtcactggtattcaaacaatgattcaagatggtgatttagatgaaaccacttctgatttacccgatgtcttaggccgaccattaccttcattaaaagaagcgttacagacgattattaaataagcctgaattgatttcaaaaaggcggttgaaccatgaaatattctcataaacttagtgatgccatccatattttggcctatgtcgatatttttcaagatggtgatttatcaagccaagcgattgctgggagcatcgagtctaatcctagtttagtgcggcggctaatgtcactactggtgaaggcggatttattagcgactaaaccggggacgattgcccctaaattagcgcgcccagcggaacagattacaatgttagccgtttttcaggcgcttgatacagatcaacggttattacacgttgatgaaaaaacaaatccagattgtttaattggtagcaacattcaagcaacccttgatgcggcttatgatcaggtgcaaaaagctgcggaagcggagatggcaaccatcacccttgatcaaattattgcggggattcttgaacgcgatgcacaaaaaaatagtttgtcagtctaagttttttatctggcgactatataatagaagaaatcggggttcgaccaagtggttgaaccccgatttttggtgtgatttgtacgtttgaaaacaatttctctttggcatactgccaaacctatgctatgctttaagctgttaatatcaagcatactatcagttgacaatcgtcaaggtagtgttttatgctaatgaacgatttgaacaaagcgttctgttgaaaggggtttgtccatggcaggcaaaaatttagtcattgtagaatcacctgcaaaggccaaaacaattgaaaagtaccttgggcgcaactataaggttgttgcaagcaagggtcacatccgcgatttaccaaagagtcaaatgggtgttgattttgaaaataattatgaacctaaatatatctcgattcgcggtaaaggcgaaacgattaaagaattaaaaaagcaagctaaaaaagttgatcatatctatctcgcagccgatccggatcgcgaaggcgaagcgattgcatggcatgtttcccatattttaaaactcgatccaactgaaaaaaaccgggttgtctttaacgaaattaccaaagacaccgttaaaagtgcttttaaaaatccacgtagtatcgatatgaaactcgttgatgcacaacaagcgcgacgcgtgcttgatcggattgtcgggtattcaatcagtccattactctggcaaaaggttaaaaaaggcttgagtgctggtcgggttcaatccgttgcgttaaaactcgtgattgatcgtgaaaacgagattaaagcctttgttccagaagaatactggtcattggatgcggaatttaaaaagagtcgcagtaagtttaacgccagtttctacggcgtgaagggtaagaaattaccccttggcgataatgatgcggttcaagcgattttgaaacaaatcgataagactaaggatttcacgattgaagatgttaagaaacgggaacgcaaacgttttgcagccgcaccatttacaacgagttccttgcaacaagaagccaaccgtaagttgaacttcagaacgcggaaaacaatgatgcaagcccaacaattgtatgaagggattaaccttggtggcaaagaaggcacggtcgggttaatcacttatatgcgtaccgattcaacccggatttctaccggtgctaaacatgaagcgtcacaattcatccatgacaattatggtgaagaatatgcggcattaaaggcgcataagacgaagaatcctgaaggtgcacaagatgcccatgaagcgattcgcccaacgtcagtgatgcggacacctaagagcttgaaagacgttttaactaacgatcaatataaaatctataacttaatctggtcacggtttgtcgccagtcagatgacaccagccatttttgatacggtcgcagttaagattgctcaaggtgatgtcttattcaaggcaaacggctcacaaatgaagttcccaggattcacgaaactctatgtgtcatcacgtgatactgaagactctgctaaggataatgtcttaccagaacttgcagttggggatgcggtgaaactcgttaaaactgatccagcgcaacattttacgcagccaccagcacgttattctgaagccaatttagttaaggctttggaagaaaacggtgttggtcgaccatcaacgtattcaccaacgatcgaaacgattcaacggcgttattacgtgaagttaaacgcaaaacgctttgaaccaactgagttaggggaaatcgtcaatggtttaattgtcgaattcttcccggacatcgttaacatcgactttacggccgatttggaacatcgtttggatgaagtcgaaacgggtaaagaagactgggtcaaggtgattgacaacttcttcaaaccgtttgaaaaagaagtcgaaaaagcgagtgaacaaatcgaaaaagtacaaattaaagatgaaccagctggctttgactgcgacatctgtggtgccccaatggttgttaaaatgggtcgttatggtaaattcttcgcttgcagtcgcttcccagattgtcgcaataccaaggcaatcgtgaaggaaatcggcgtcacctgtcccaaatgtggtaaggggcaagtcatcgaacgtaaatcgaagaagaatcgcttattttacggttgtgatcgttacccagattgtgattttgtcacatgggataaacccgtcggcagaaactgtccgaagtgtgaacactaccttgttgaaaagaaaattaaaggtggcaaacaagtaatttgtccaaacggtgactacgaagaaaccgtccaaaaataattagaaaaatggagactagcaaatgagcacagaaccttttgtaaacgtgattggtgccggattagccggttcagaagcagcatggcaaattgcccaacgcggtgtgaatgtgcacctctatgaaatgcgtcccgttaaaatgacaccggcgcaccatacagaacaattcgcagaattagtgtgtacgaattcgctccgtgcgaaccaaattaccaatgcggttggcttaattaaagaagaaatgcgtcacttggactcattaatcatcagtgcggctgatcaaaatgccgttcctgctggtggcgcattggccgttgaccgcacaccgttttcacaaacggtgacggatcgcttagccaatcatgaacgtgtcacagttcatcatgaagaattaaccgattttccagaaggtcctacgattgtggccactggtccattaacgtccgaaggcttagctgaaaaaatcagtgccttaaacggcagtgatggcttgtatttctacgatgctgcagcgcccattttggataagaacagtatcgatttcgataaagtttacctcaaatcacggtatgataagggcgaagctgcttacttaaactgtccaatgactgaagaagaattcgaaaacttctacaaagccttgattagcgctgaagttgcagaaatgcatgactttgaagaagaaaagttctttgatggctgtatgccaatcgaagtgatggccaaacgcgggattaagacgatgttattcgggcctttgaaacccgttggattggaagatccgaatactggcaaacaaccatacgccgttgtgcaattgcgccaagacaatgcggctgctagtttgtacaacattgttggtttccaaacacatttgaagtggggcgaacaaaaacgggttttccgcatgattcctggtttggaaaatgctgaatttgtgcggtatggtgtgatgcatcgcaatactttcatgaaatcaccagatgttttattaccaacctatcaatcaaaacaacgtgacgatctattcttcgctggtcaaatgactggggttgaaggctacgttgaaagtgccgcttctggactagtggctgggattaacgccgctaaactggcgttggaccaaacaccggctgttttcccaacggatacggcgatgggatcaatggcgcactatattacccatacgagtgccaaacatttccaaccgatgaatgcgaactttgggattttcgaacctttgaaacaacggattcgcgataaaaaggaacggaaccaagcacttgctgatcgcgcacttgaaagtatcgaccaatttaagacgacactttaattagaatcttttaaatcccgccaggcttgtggtaaagtaatactaatcaagcttggagggatttttttggcgttagaacaagaatggcttaatctttttttacagtacttagtggtcgatcggcattactcgccagaaacccaaaaagcttatcaagctgatattcagatgttcagtgcttttttaaccgctaacggcggcttagcgtcgtttaaacaggtcacgccactggacgtgcagacttacttgaatgaaatggatcaaaaagaatatagtcgtgaaactgtcgcgcggcgaatttcgagtttgcggtcgttttaccggtatttagtgaaaaatgagttcgtgcaaaccgatccttttgaagctgttcaattaaaaaagcaacagcataagctgccgcggtttttttacgaaaaggaaatggacgcgctatttgctgccattgatggggatcaaccactcgatcaacggaatcgcgccatcttagaattactgtatgcgacggggatgcgggtgagtgagtgcgcgcagttgacggtagcacaaattgatttcggcttacgcgtcattcttgttcatggaaagggcaataaagatcgctatgtaccattcgggcaccatgctgaacgtgccttgcaagcttatttaaaagttggtcgtgttcaattgatggccaaaaaacaattggaccacgatgtcgtttttgttaatcatctcggagcgccaattacaagtcggggaattgaatacattttagatcagattatcaagaaaacaagtttaacgagtgacattcatccgcatatgattcggcatacctttgcaactcacttattggatcacggtgctgatctgcgaacggtgcaggaattattaggccacagtagtttatcaaccacacagatttacacccatgtcaccacagcccatttacaaaaagattaccgccaattctttccccgcgcgtaaaactcggactaaagtttgatttttttcaacgaaaaatagactaatattagcacacagtcttaaagactgctaaaatagaagtgcgttcaaaccggttatgttctgagaattagcctaacaaggcgaatgattactggaagcaattgtttgacttgtgtagctaaacgcaagaacatggtttgaaaagaacgttaagaaagaagtgcgtcatcaacgggttgtttttgagcatttgcctaatcaggcggattaccggcaacgccggtgatatgacagatgtagcaaagcgtagaaagcagttgatgaaagcacgttaagaaaaaagtaagtgctttcaagcttgttcaacttttgagcactagcacagggaagcgaattagcgataaagtcgctgatttgattcacagcgctaagcgcagaaagttagtttgaaaagcacgttaagccccgcccaatccccaaacaacgttaggagtaattcatatgacaacaatttgtgcagttaaacataatggtaaaacagctatcgccggtgacggtcaagtcaccatgggcgaaaaatttgtgacgaaggattctgctaaaaaggtccgtcgaatttatggtaatcaagtcgcaatcggctttgctggtggtgttgcagatgcctttacgctacaagaatggtttgaacaaaaattagaaaagtattcaggcgacctgcaacatgctgctgttgctttagcgcaagactggcgtaaagatccaacgcttcaaaaattagaagcgatgttgattgcggtcaatgcgactgatattttattaatttcagggaatggtgaagtcatcacccctgatacgctatcggaatcaggtgatcaagtgattgccgtgggttcaggcggcaatttcgcccaagcagcagctaccgcattattacttgaaggaaaagatgacttatccgttgaaaaaatcgtcacaaccagtgttgatattgctggtggaatcgatgtttacaccaaccacaacgtgattgtcgaatcattttaggaggtcgcacaatggacttaatgaataaaacacccaaaacaatcgttgccgaacttgatcaatttgtcattggccaagatcaagctaaaaaagccgttgcggttgcactatacaaccgttatcgccggatgcaactcagtgcaaaaatgcaacaagaaatcacgcctaaaaatctattaatgatcgggccaactggggtcgggaaaacagaaattgcccgacggttagcgaaagttgtcgatgccccatttatcaaggttgaagccactaaatttaccgaagtggggtatgtgggacgtgacgttgaatcaatggtccgcgacttagctgatgtggctgtgcatatggaagaaacagaacaatttaaaaacgttcgtgctaaggctgctcgtcaagcagacaagcgcttggttaaactactagtaccgggcattaaaaaggaacaacgtaagaacaataacaacatgaatgatttaatgaacatgtttaacgcgcttcaaaaaggggaaacaccagctggtttcggacaaactgaaccagaagaagtgacggatgatatccgtaacgaacggttatctgttaaagaacagttagataaaggcttgttagatgaccgggaaatcgaaattcaagttgatgaaccgaaaaaagttgccccaatgaacgatatgatgggccagatgggaattgatttaaacgatactctgggttcaattatgccgaagaaaaaaattacgcggacggtaacggttaaagaagtgcgtgaagttttcattcaagaagaatccgctaaattagtcaaccatgccgatatttaccatgatgcgctccaacgtgttgaaaataccgggattatttttatcgatgaaattgataaaattacggctggtggcaaaaaacaatctggtgaagtctctcgtgaaggggttcaacgtgatattttaccaatcgttgaaggctcacaagtcaatacgaaatacggtgttttgaagaccgaccatatcttatttatcggttcaggggcgtttgctgaatcaaaacccagcgatttaatcgctgaattacaaggacggttcccaatccgggttgaacttgaagatttaactgaaaaagacttcatccgaattttaacggaaccaaacaacgcacttgtaaaacaatacatggcgttgattggcgccgatggggtgcacgtcaccttcacgatggaagcaatcggccgcattgctgcgattgccttccaagttaaccatgataccgataatattggtgcgcgtcgtttggccaccatcttagagaagctattagaggatattctctttgaaggtcctgacatgcagatgggggatatcaccatcacagaacaatatgtcaacgataagatcggtaatattgcagccgataaagatttaacccgctttattctataatttttaaaaggtggtattttaagatgatccaaattgcaaacgaatttttaacggtgaccctcagtccaaaaggcgccgaattacaaagtattaagggcgccgtttcggggcttgaatatttatggcaagctgatcccgatgtttggggccggcacgcacccgttttattcccattcgtggggcgttcaaaagcggaccaatatacgtataatggccaaacctatccgatgggtcaacacggttttgcacgtgatcgcgaattcagtatcgaagaacaatcggaccacgccgtgactttcttgttgaaagcagacgctgacagccgggccgtgtatccatttgaatttgaattacgtgtgagctatcgtgttcatgatatgcatttgacggttggctatgacgtccgcaatgttgcgccaagcgggccaatgtacttctcaattgggggtcatccaggatttaaagtcccattaacggatgacacgcaatttgaagattatttcttagactaccgcccacaaaaatcacgggttaagatcccattgcaaggggccttcattaatttgaacgaccggacgttagcaccaaccgacgtcgcaacggatatcaatcaccaattatttaaaaatgacgccttaatctacgaattaaagggtcaagccaatgaattcagtattcgttctgaaaaaacggaccactcagtgaccatgaaattggctggcgccccattcatcggtgtttggtcaccttatccaacagaaggcaaccttgtgtgccttgaaccttggtgggggattgcggataccgttgacgcaagcggtgaattttcagaaaaatttggtgtcaacgaactggctgcaggtgaaacgtttaatgcaagttatgaaattactgttcgttaatgaatgattaaaaaaacgcacttaccaagatggtgagtgcgtttttttagtaaactggctgtaggcgggtaacgcgttctaaacgcactctgctagtttttccagtagttccatgctaagatataagttataaaatcataggttaggtagggtaagtcatgactgaagaaaagaagtattacggcgcggatgccatcatcgatagtttagtaaatcatgatgttgagtacgtgttcgggattccgggtgcgaagattgatcgggtttttgaacgactagaacatcccgttaatccaaagacgcccaaattaattttgacgcgccatgaacaaaatgcagccttcatggcggctgggattggtcggattacgggcaaaccaggcgttgtaatggcgacttcaggccctggtgccagtaatttagcgacgggggtcgtgacagcaacggcagaaggtgatccagtcttagccattgccggtcaagtgaaacgcgctgatttgttgcgactaacgcatcaaagcatgcgtaatgccgctttattcgcaccaatcacaaaattcagtgcggaagtccaagaacctgagaatttatcagaagtgattgctaacgcctatcaagaagctgaatccgctaaacagggcgcaacgtttgtcagcatcccacaagatgtcacggactcagaagttcattctaaagtgattaaaccgctaatggcgcctaaattagggccagccagtcccgttgaaacgacgcttttggcacaacggattaaagaagcaaaattaccagtacttttagttggtatgcgcgcttcttcaccagaagtgacagcagcgattcgcaatttagtggctgaaacccacattccggtcgttgaaacgttccaagcagccggtgtcatttcgcgtgatttagagactgatttttatgggcgagttggtttattccggaatcaaccaggcgaccgcattctaaaacgcagtgatcttgttattgcagtcggctatgatccaatcgaatatgaaccgcgtaactggaacgctgaaagtgatgcgcacattatggtgattgatgatatgcgcgctgaaatcgatcataatttccaacctgaaaaagaattggtcggcgatattgcgcagaccctagactttttattaccttatatgaaggggtatcaactagcgggcgatgtgcgtgattatttagttgaattgcacgcagaactcaatcaacgtgacacggcacctgaaatgacgaccaataatccacttagtcatccgttgaacattatttcagaactgcaagcacgggtcaccgacgaaatgaccgtcacggtcgatgttggtagtcattacatctggatggcgcggcattttagaagttacgaaccacggcacttgctctttagtaacgggatgcagaccttaggtgtggcattgccatgggcgatcagtgctgctctagtgcggccaaatacacaaattgtgtcggtttcgggagatggtggcttcttattctcaggtcaagacttagaaactgcggtgcgtctgaacttaaacatcgtgcatattatttggaatgacggttattatgacatggtaaaattccaagaagaaatgaaatatggcgaatcagcggccgttaagtttggtcccgttgattttgtccaatatgcagagagttttggtgcaaccgggttacgggtcgaaaaagccgcagatcttggtaaagtattggatcaagcctttgccattgatggtcccgtccttgtagatgtgcccgttgattacaaagataatcaattattaggccaagcattattacctgaccaactcgtttaatttgaggaggaaaatcaatgacaaatgatgtcaaacgcgtttatcaacacggaacgttagccctattaattccgggactctttacagggacaatgaccgttgctgaattattaacccatgggaattttggaatcgggacggcgcacggtttagctggcgaactggtcttattagatggccatgcttatactgtgaatggggatggccaagtgactgaactcgcacctgatgcgacagttccatttgcgacagtgcattggcaagattcatcattacctacacaagcggttcatcaacgcacaaaggctgagttagaaacgcaaattctagcgcaagcaccgttaaaaaacttgttttttgcggttaaaatgactgggactttcaaagtcatgcatacgcgggccgtccaaacacaacaggagccttatccgaatttgactgctgcaacccgagtgcaaccggagtttgaacaaacagacgtaacgggcacgttgattgggtattatgcaccagcgctttatcaaggcgcagctgttgcaggctatcacgtacacttcttaaacgatacgcacgactttggcggtcatattctagactataccgtggtcgatgctcaaatgacgctccaaccgtttgaaacgtttgaacagcacttcccaagtgataacgaagcttttttaaagagtgactttgacttacaacaagtcaatgccgatattgaagaagcagaacactaaacattcaaaaagcccacggaaaaatccatgggcttttttgtattttaagcatggtggttaattggaccgtacttgtggccgacttcaatcgggttagcgatggcgcggtgaacaaattgtttagcggtcttaatggcagcctcaattgtctgccccttagcgatttcagcacagatgcaagctgaaagtgaatcgcccgtcccattaatatgggtagtttcaacgtaaggttctgatagccaaaattcttgtccatcggcaaggcaaacgtagtctgtaacgattgattgtccggcctcgtgatggcctttaatcatgacgttttttgcgtccattgccaatagtgcttggccagcagcttggaaatcagcaggtgtcttcagttcaataccagttaatttttgcgcttcgtagaaattaggcgttaggacagttgcaaggggcattaattctgtctttagtgtgttaaaagcatcatctgccaacaacaatgcttcatgcttggtaataatgaccggatctaacactaggggaccaaagtcatgttttttcaactgattagcaacggttagaatggtctcacggtcggttaacattcctgttttgcaagcgcgaacctgaaagtcggctgcaattgcttcaaactcggcatcaataaagtcgggagacagtgcttggctagcacgaatcccatatgaatttccagcaacacaggctgtcaaaatgctcataccataaacattacgggcaaaaaaagtatttaaatctgcttgcgcaccggcactgccatcagaatcggaaccggcaattgtcatgacttgcggaaagctatttaacattatcaacatctcttttccagagcggacggaacgtccatcacttaatatatcctaatattagtataagcttttaggtgtccttttttcaatcagcagaagacactaattaagtgaatttcgtgtatactatgaattaaataattatcaggagggacttatgattcaattaaaaatcgaacgattatcttatcaggttgatcaacaagtgattttaaccgacattaatttaaccgttgaaaaaggcagttacttaacgattacaggaccttctgggggtggtaagagtaccttgttacggttaattgcggacttactaacgccgacacgtggcaccattttattaaatgatcagccactgacccagtttagtcccaatcagtatcgacaaaaggtttcgtattgttttcaacaagcaacgttatttggtgaaacaatcggggataatttacgttttccatacgagattcgtaatttaccggtcgatatggcagcaattgaaaaagcgttggcagcggttgggttagccaacatgccactaacgaaaaaaattaccacgttatcgggcggtgaaaagcaacgaattgccttgattcgtaatgttttatttccaccggaagttttattacttgatgaaattacgactggtttagatgccgctaataaggcaattgtattggcgtttgtccagcacctcaatgaggattgcgggctcacaattattgccattacccacgatacagaagaattacaacggaaagggcgccaggtgcaaattgttgctggcgaattggtaaatcaagatgaacttagccgttaatggtctttcactgacgtttgctgtgacattagtgtttgtcgcattagtcattagcttccatgaaaaaatcggtcttgaaaaagatatgattatcagtgtttttcgcgcaatcattcaattatttatcgttggttatttactgaaattcatttttcatattaacgatgtgtggctaacgttattgatgatgctgatcattatttttaacgccgcagcaaatgccaaaaagcgggcggggaaactacgcaacgggtttccaatttcatttatcgcaattttaacaagtactggggtcacgttaggattacttgttttatctggggcgattaagtttattccatcgcaaattattccaattactgggatgattgcttccaactcgatggtcgccattggcttgagttaccgcagcttactggcgcaatttaaggatgaacggcaacctgttttggaacgactcgccttgggagcgaccgctaaacaagcatcaattgccattattcgtgagagtattcgtacggggatgtcacccacgatcgattccgctaaaacgatggggcttgtcagcctgccagggatgatgtcgggcctgatttttgccggaattgatccagtcaaggccattatgtaccagatattagtgacctttatgttattatcggcaacgagtcttggttcagtgattgcgtgttacttagcttatcgatcattttacaatgaacgggaacaattgattgatctttaactgattgcacaaaaaaacgcccgttcggcgtttttttagttatcgatgtttttgtttatagcgatagtacaggccaaatggcactaagttttcagtgccatttttaatgcgttgtagattttcgcggtgccggtagaccaggaaaagtaagaccaaggtcgcaatcgaaccgagtagccaatcatgcgtgtaaaacgataaaatcgcaatcatcaatggaccgaggatgctagccatgctaaccatacttgtaatcaggatgacactgataaagatggtactggcaattacgaagaaaagtggattgtatgccagtaagatgcctgcgctggttgcaacggcttttccccccgtaaagtgtaaaaagatggagtaagcatgaccgacaacggccgctaagccgacgattaagaccaatgcatgattggggatgtgaaaaatcatcggtaggctagcagcaagtgtgccttttaaaatatcaagaaataaaacggctgtcccagcgattgggccgagcacgcgatacgagttagttgtgccgatattatggcttccagcatctcggggatctttgtgacagaaaacgcggccgataataacgcctgatgggaacgaaccgatcaggtacgcaagaataaagataagactaagtttcatgacaaaaactcctatttgtggcatttgtttcccctattttagcattttgacaagggaaaaggaatattgtatgttagaataggtgaatacgaacatacatttgtattggcaagaaattttaaatttttgattgtaaaatcatccaaacttgttgataatataccttatctgttcatttttaaacaaaggagtcatacttgaatgccaaatcaaaaacaagattataatgataattcgattcaggtcttagaaggtctagaagcagttcgaaaacggcctggcatgtacattggctcaactgacggtcgcggcttgcaccatttggtgtacgaaattgtcgataacgctgtcgatgaagccttggctggttttggttcagaaatcaacgtcgtaattggcgcggataatagtattagtgtccgtgatcatggtcgtgggatgccgactgggatgcaccaatctgggattcctacgattgaagttattttgacagtgcttcacgcaggtgggaaatttacccaaaacagttataaaacatccggcggtttgcatggggttggcgcgagtgtcgtcaatgccttatccgaatggttgaccgtccgcgttgtgcgtgatggtgttgcctacgaagaacgctttgaaaatgggggccacccggttggtaccttgaaaaaagttggcaaagctaaagaaccaaacggcacgttaattacgtttaagccagatgggacaatttttcaaacgactacttataactacaataccttagcagaacgattacgcgaatctgcctttttactcaaagatgtcaagattacgttgaccgatttacgcgctgagccagcacgtgaagatgtcttccattacccagaagggattcaatcatttgtcgattatttgaacgaagataaagatacgattggtaataagttatatttcgaaggcaccaaagaagacattgaagtcgaatttgcgggtcaatataacgatggctactccgaaaacatcatgtcatttgtgaataatgtccggacaggtgatggtgggacccatgaagctgggatgaaagccggcttaaccaaagcttttaacgattacgcccgcaaggtaaacttgctcaaagaacgagataaaaacatggaaggctccgacgtacgtgaaggtcttagtgccgtcttgtctgtccggattccagaagaactcttgcaatttgaagggcaaaccaagggtaagctaggctcgccacaagcgcggacagctgtcgatagtttggtttatgaacaaatgagctttttcttacttgaaaatggtgaatttgcgcaagccttagtgcgtaaatcattaaaagcacgcgaagcacgtgaagctgcgcgtaaagcacgtgaacaaagtcgaaatggtaagaaaaagaagaaatccgatggcttattatctgggaagctaacaccagcgcaatcgaaaaatgcggcgaagaatgaattgtacttggtcgaaggggattctgctgggggttctgctaagcaagggcgcgatcggaaattccaagcgattttgccattgcggggcaaagttttaaatactcaaaaagcgaaattacaagaaattctaaaaaatgaagaaatcaacacgatgatttacacgattggggccggagtcggggctgaattcaaacttgaagacagcaattacgataaagtcatcatcatgaccgatgcggataccgatggggcccatattcaaattttgttgttaaccttcttctaccgctatatgcggccgttaattgaagccggaaaagtctacattgccttgccaccattgtataagctccaaaaaggtgctggggcaaaaacgaagattgcctatgcttggactgatgatgaattgaaagtcgtcgctaaagaaatgggtaaaggctacagtcaacaacgtttcaaagggttgggtgaaatgaatgctgatcaactttgggataccacaatggatccaacgagtcggacgttaattcgggtgcggattgatgatgcagccttagctgaacgccgcgtcacaacgttgatgggcgataaagttgaaccacgtcggaagtggattgaagaaaacgttaagttcacaatggctgaagatggtagcatcttagatacaacgaatggtcaaccagcaccgacaacttcaagcgctgaagtggatttatttgaccaattagacgaatagaaaagtgagtgattaaatttggctgatgaagcacaaaaaattcaagagctaacgcttgaagaagtcatgggcgaccgctttggccgctattcaaaatacatcattcaagagcgggcgttaccagatattcgcgatgggttaaaacccgttcaacggcgaattttatacgcaatgtccatcgatgggaatacttatgataaagggttccggaagtcagcgaagtctgtcgggaatgtcatggggaatttccatccgcatggggatagttcaatttatgaagcgatggtccggttaagtcaggactggaaattacgtgaaccactgattgaaatgcatgggaataatgggtcaatggatggggatccaccagcagcaatgcggtatactgaggcacgcttaagtaagattgctggtgaaatgctcaaggacatcgataaaaagacggttgatttcgttttaaacttcgatgataccgctgaagaacccactgttttaccagctcggttcccaaacctcttagtgaatggggcaactgggatttcagctgggtacgcgactgaaattccgccacataatttaggtgaagtgactgatggcttggtctatctattggatcatcccgatgcaacgttagaaaaaatgatgaccttcatcaaaggacctgatttcccaactggtgggatcttacaaggggtcgatgggattaagaaagcctatgaaactggtcgcggtcgagttgtcgtccgggcaaaaaccagcatccaacaattacgcggcaatcgggaacaaatcgtgattagcgaaattccttatgaagtcaacaaggctatgatggtcaagaagattgatgaattacgcgttttaaagaaggtcgatgggattgctgaagtacgagatgaaagtgatcggatgggcttatcagtcgttgttgaattgaaaaagcaagcggatagtcaagggatcttgaattatctgttcaaaaatacggatctgcaaatcacatataactttaatatggtcgccatctcgcatatgcaacctaaacaggttggcttattagaaatcctccatgcctacttggaacatcaagaagaagtcgtgattcggcggacaaaatataccttacaaaaggcattggatcgtcagcacattgtcgcagggctaatcaaggcgctctcgattttagatcaagtgattgcgacgattcgtggtagcaagaataaaaaagacgctaaagataatttagtggcaagctacgccttcacagaagcccaagctgaagcgattatttcactgcaattataccggttaacgaataccgatgtgactgctttggaacaagaatcagctgaacttgatgcagcgattaaggaataccggatgattcttggtgatccaaaagcacttgcacgggtgattaaggcgcagttaaaagcaatggtcaaaacttatcggagtgaccgaaaaactgaaattgaagcacaaattgagacgcttgaaattgatacaagtgtgactgttgttgacgaaaccgtcatggttgcagttagccatgacggctacttgaaacgtagtagtttgcgctcgtatcaagcatctgaaggggccgacagcggtttgaaagacggcgattttgccattttacaaaagccactacaaaccttagatcaattgatgatgttcaccaattacggacatttaattcaacgaccagttcatgaaattgctgatttgaaatggaaggaaatgggcgaacatatttcgcaatcgattggtttggcggctgatgaagcgattattgcagcatttgcctttaagccaaatgaacaggctggctactttgtgattgggacggatgatggctatattaaacaaactgccttctctgacctcttgccaagtcgaacatatcgttctaaggcacaagactttattaagttgcatgcagatgctcatgtgacaaacgtgaactggattccaagtgatgaagggctagccgtctttagtgctagctataaaggttatggattgagttttaccttatctgaagtctctgtatcaggtgctaaggccagtggggtcaaattaatggatctcaaagatggggatgttgtcatcggctttacgttatatcatccagaagataaacatgcagccgttgccattgtgacgcaacggggcgcctttaaacggatgctcttaagtgaggttggtttaacaagtcgtgcgcgtcgtggggtcttaattctccgtgaattgaagaaagaaccacatcgggtagcagcaatggttagtgttgagcaggcaagcgagttactgattcatactgatcagcaagaagtgattgcaattaacccttatcaacatgcaactgccgaccgttattcgaacggtagttttgtgatggatgttgatgaagttggacaaccggcatttgttcaaacgactattccagttaaaaatgaagacgagtcaaaataataaaaaagcaagtcatctatgtgatgacttgcttttttctgttatacataatatgcggattttttggttttgtactataacagcaaaataagttttgcacaatttaaatggtggggttataaaaatattttaagtagataaatagctataaatcaatctttcaaaagagtttaagagtttctaaacaatcaaaaagaaagggcttgcataaactatgtgatgtgttatactaaaattgtgaaaactgtgataaacaacacttgactaatggaggtaatccacatggtaaaaaccgaaaaaattaacttagccgactattgggacggctttaacaaaggtgactggcaagatgaaattgatattcgtgatttcatccaacaaaactttactgcctatgacggtgatgaaagtttcttagctggtccaaccgaagcaacaacaacgttaaatgatcaactaatggaattgaagaaacaagaacgtgaagcaggtggcgttttagccgcagacaatgataatcctgcaacagttacgtcacacggccctggttatttaaacaaggatcttgaaaagattgttggattacaaactgatgccccattaaaacgcgcattcatgccatttggtgggattcggatggccgaagatgccttggaagcatacggctttaagactgatccagaacaacacaagatttttaacgaataccgcaagacacataatcaaggtgtttttgatgcttatacaccagacatgcgtaaagcacgtcactacaagattattacgggccttccagatgcctatgcacgtggtcggattattcctgacttaccacggattgcagtctatgggattgatcgtttagctgaagaaaaagtccgtgactttaatggtgttggcgacggtgaaatgacagacgatgtcattcgtcttcgtgaagaaatcaatgaacaatatcgtgctttacaagatatgaagaaaatggctgctagctatggctttgatatttcaagacctgctaagaatgcccaagaagcaattcaatggatttacttcggttacttagccgctattaagacacaaaacggggctgcgatgtcagttggccggattgatacaacgatggatatctttatccaacgtgatttagagcggggcttaattacagaagctgaagcgcaagaaatggttgaccattttgtcatgaagttacggatggttcgtttcattcggacagaagattataattcattattctcaggtgatccaatctgggcaacattatcaatgtgtgggattggtatggatggtcgtcatcatgtcactaagactgccttccgtgtcttgaagacattggaaaatatgggtgctgctccagaacctaatatcaccttactttggtcagatcgcttaccagaaggtttcaagcgctatgcaacagaagtttcaattaagagttcaacgattcaatacgaaaacgatgatttgatgcgtaatgaatgggggagtgactattatgggattgcatgctgtgtttctgcacaaccaattgcagacggcgttcaatattttggtgcgcgtgctaacttggctaagacaatcctttacgcaattaacggcgggatcgatgaattaggcaaagctcaagtcggcccagcttatcaaccaattacaagtgaaatcattgattacaaagaattcatgggtaaatacgataagatgttagattggttagcagacgtttacgttaatgctttaaacaccatccactacatgcatgataagtattactatgaatcagcacaattggcattgaagaatagtcgtttagaccggacatttgcgactggtatttctggtctatcacatgcggttgattcaatctcagcgattaaatacggccaagttaaagttatccgtgatgaagacggtatggcagtcgatttcgaagcgcaaaatccagactatccacgttatgggaacaatgacgaccgcgctgacgatatcgctaaatggttagtgaagactttctatacgaagatgaatacgcatcatttatatcgtggctcaaaattatcaacatctgttttaacaatcacatcaaatgttgtgtatggtaagaatactgggacaacaccaaatggtcgtcaagctggcgaaccattctcaccaggtgctaacccagcatacggtgctgaaaagaacggtgctttagcatcattactttcaactgcgaagattccataccgttatgcaactgatgggatttcaaatacgtttggtgtcacaccaaatacattagggcatgatgatgaagcacgtaaagatgcgcttgtgaacatggtcgatggttacatgattaatcaagggatgcatttaaatatcaacgtcttcaataagcaaaccttaatggatgcacaacaacatccagaagaatacccaacattaacggttcgggtttcaggttattgtgtctacttcgctgatttaacgaaggaacaacaagacgacgttatctcaagaacgttctttgacgaaatgtaatctaacgaaagtggatagcaatatccgctttctggtaaggtcgttaacgcgaattaacgactttaccagaaagcatagcttttcttttaagaggtgaaagtgaaatgacaattaaatttacaacacggttatcaactgaaaatgttgttccagaaaccccgataacaccagaggtgccaattggatatgttcattcgattgaaacatttggttcagtggatggtcccggaattcggtttgtcgcctttttacaaggctgtcgcatgcgttgcgaattctgtcataatccagatacgtggaatattggtagcggagaagcttataccgcagacgaattaatcgcaaaggcactgccatataaggccttctggggtaaagatggcggaattacctgtagcggtggtgaatccttaattcaaattgattttttaattgatttatttaaaaagtgtaaggcacaagggattaatacctgtttggatacttgtgggcagccgtttacgtataaagaacccttctttagtaaattcaaagaattgatgaaatataccgatctttcaatggtcgatattaagcatattgatccagcggggcacaaaaagttaaccggcttttctaacgaacatattttggaaatgattgaatatatgtcaaatcatggtcatcatatgtggattcggcacgtcttgattccagaacggacggattacgatgagtatctcactcgtctaggggattatattcaaacgttaaacaatgttgaccgagtcgaagtgttgccctaccatacgatgggaatcgtgaaatacgaaaagatggggattaaatatccgttagcggggattgaaccaccgacccacgatcgcgttgtcaatgcggagcgtctattgcatacagcagactatccaaagcagcaacgctaacataagaaaattttaagcctttaataagaatgagcaacgaaaggggttgctctttttttatatctttattattataatgataggcgtaaactaaagaacggagatttgaaaatgaaaacaagacaagaaaatatcttctcctctaaaacattaacctatttcctacagttagcggaaacgatgaattatacccaagcggcacaactactcggtatcacgcaacctgctttaacccaacagattaaaaaattagaacggatagtcggcgcgcctttattttattcagtcggcaagaagttacatatttcggatgctggtcggacgatgttggatgctacccatcggattcatgatttattaaatactgcgacggatgaaattcaaagttcaacgagtgcgacgcgcggtaagattaatattgggattttagcatcgatggaaatcagtgttatccaatccttcttaattcaatactataaacaatttcctgacatcgaagtcagcatgcacttattgactcggaaagaaatctgggaccgacttgaaaataataaaattgatattgccattatgtatttgccagatgacagcattaagaactggaaaccttataagtcacataagattgtggatgaacgcttactctttatcagccaagatcctgctttaaagacgcgtaagaagatccgttttaaagatacattagataataaatgggtgacatacccagatgaatactatttaaatcaattcatcagtgaagcctataagaatcaattggttgatcgtccagtgagtgcggctcaattcacatcaccatttgaaatcatgcgttttgctgaagcaactgaattaagtacagctttaccaaagagtttttatgaagcacataatttgggacttaagggaaacgcggttcaatttgatccggccattcagttcgaattagcttttgtcttccgcaaggaaaaggaagatattccacggattaatagctttttccgtgaattcgaccattatttagaagaaaaagattatttaacacggattagagagcaaaaccgtagaatcgtctaatatttttggtataattaggatgttatttttttaaaaggaaggtctgtataaatatgagtaaagaattagtattcggtcaccaaaatccagatacagacgcaattgttgcggcaatggcgtttgcttatcttcaacaacaactaggaaacgacgtagaagccgttgcgctaggtgaacctaatgaagaaacaagctatgcattgcgtcattttgcagcagcaacccctcgcatcattaaagaagcaagcagtgaagttgacagtgtgatgttggttgatcataacgaaagccaacaaagtgttgccgatatcaaagatttaacagtgacgcacgttgttgatcatcatcgaattgcaaacttcgaaacagtcagcccattattctaccgcgctgaaccagttggctgtaccagcacaattttattatcaatgttcaacgaaaacaaagttgaaattccagctcaattagctggtttaatgatgagtgctatcatttcagatacgttgttgatgaaatcacctacaacaactgaaaaagatcggattgcgattaagacattggctgaaattgctgatattgatttcgaatcatatggtcttgaaatgttaaaagcgggcactaacttagatgataagagcgaagctgaattaattgaagcggatgctaaaacattcgatatggctggtaaaaaagtgcgtatcgatcaagtgaatacagttgatatcgaagcggtcttcaaacgccaagctgcttttgaagctgctatcgaagcagacaataaagctaatggttacgacttattcgtacttttgattactgacatcttaaacagtaactcagaagcgcttgttatcggtgaaccagcagaagcctttgaaaaagcattcaacgtaaaattgaacaaccatcgtgcacaattagccggtgttgtttcacgtaagaaacaagtggttccacaattaacagaagcattttaataacgattaataataaagtccttcggggctttatttttttattaggaggataggtaaatgaccgaggaaagcattgatgcaattcaagtgattgaagcgacaattcgaaattgccaaaagagtcagctgaagtttgtagcgggttcggctcaatttactttattaaaaaataggctttacgcattagaagttggtcgtgatttattgaacgggcacacagacataacagtcgaagccttagtcgaggcacaagccccgattgaatcgattattcataaaactgaaaaagcactctctaatcaaaaaaaacatcacccgtgataaaacgaatgactctattattagcagcgatgactgccgtgcagactgctattataaaccaactatctgcaaaaaagacccctcattaatttgggggcttttttgtgtgccaccagattggaattattctaatctaactaaaaatgtgttataatgtaaatgaattcataagaaggagcgattgacgatgaaacataccatcaagtttgccttaacaattagtgtgggtgtgattgcgctatgcttggcgtttttgctacatgagccattgtgggcacagattttagtgagtttagcggggagcttagtagcgctctcgatgtttattgagatgattaaaacgctaaaatctggtcaatacggggtggatctattagcgattaccgctattattgcgacgttagcggtcggtgaatattgggcagcattaatggtcttggtcatgttaactggtggcgactcattggaagactatgcagcgcataaagcaggccgtgagttaaagacattacttgataattctccgcaaacagcgcatcgccttgttaatgatgcggtcgaagatgtttcagtcgataagcttcaagttggtgatcaagtgattattaaacctggcgaattggtccctgttgatgggcatattattgcaggaagtgctttattcgatgaatcatcgttaacgggtgaatcacgccccgttgaaaaagcactaaatgatgagctcatgtcaggctctgtgaacggcgatacgtcggttaccatgcaagttgaccaattagccgttaatagccaatatcaagcaattgtacggcttgtagagacctctgcggcacaaccagcgcattttgtgcgcttagctgatcgatatgccgtgccatttacattagttgcgtatgtgattgctggagtagcttggtggttatctaaggatccagtacggtttgcagaagtgcttgtcgtggcttcgccgtgcccattaatattggcagcgcctatcgcgttaatctcagggatgagtcgtgctagtcgaaacgggattattgtcaaggctggcacaacaattgaaaaattagcgtctgctaaatcagcagcgtttgataaaactggaacaattacgaatggtcaattgacggttgaccaagttgtgccagtgattggtatcgcaccaaccgatttattgcaattggcggctagtgcggagcaagaatcttcgcatattttagcacggtcacttgttaaagcggcacaggtagaacaattacaaccaattgaaacattaaaagaagcaacgggcgctggggtagttgcgacgctgtcgtctggacaaacggttcgtgttgggaaacatcaattcgtgacgccagatgcgcaacagcctctgcaagaacaaaccactgtttacgttgcgatcaatgatcaatatgcggggtacattacgtttatcgatcatttacgaccagaagcaccggccacgatgcagacgctccatcaactggggattacgcgtttgatgatgttgacaggcgatcaagcgacaactgcgcaccagattgcggaacaagtcggaattgatgacgtccatgcaggctgtctgccagtcgataagattcatttaattgaacaagtactgcaagaccaacgcccactaattatggttggtgatggggtcaacgatgcaccgtcactggcaagtgctgatgtcgggattgcgatgggggcccatggcgcaacagccgcaagtgaatcagcggatgtggtgattctaaaagatgatttaggacgggttagtcgtgccgttcaaatcgcgcgtgacacgatgcgcgttgctcgccaggcggttttgattgggattgcaatctgtattgggttaatgttgattgccagcaccgggattgttccagcattagtgggggctttattccaagaggttgtcgatacagtttcaatcttatatgcattacgagctagaacggatcgttaagggaattaaaaagagccgtattaacaccattcaagtgttaatacggctctttttttgtttatttttcagattgtacgtgtaaaaccatgtcttttggtaaatataacttaggcaccatggctaaacaaatacatagaacgatgccggttagaatgaagctagcgataaagctgccaccgttaacagtgagcgagtatagccaagcattcatacctttgggagcgtatgagccccaataaacggcaccggctaagaagtggcagaagtattttgcaaaagtaccaaaaaatgcggccatcaataaaagggtcatcgttttgacttttgtatgattttgaatacttgcttgaataggtcgttgtaagatacctgctaaaccaacaaccatgaaggcaatggtaaattctagcaatccttgccatacgttcaagacactaccgtttcctaatccacgtaagattaagtctagtagaccccagattaagccggagaccattccaggaatggcaccacggcgtaaactgtagattacaatagggataatcccaaaggagacttcgattgcggaaggccccactgtatgggggatgtattccaatgccacggcaaatgccgcgatgattgccccttcaatctgaatcaatagacgctgatgttgcataaaaataaccccttttcttgttcaaccaacacaaaaaaggagttatcatttcaactccatcacaattcctacgcttgtcttaacaaacaggttcgaagggtctgattaaaatcactctcagccaatggctcccctttgcgatggttaacatttaatttttaggaacgctttcagtatactcgatagctggtataagtcaagcaatgtgtaaatcgacgaattgatgtaaaccaaatgactgttagaacgacattgataatcgttgccaagaagagcactaatagtggctattcaagctggtccattgccgagcgttgttcatcagcaacgacgtgcgtatataagtgagtagcttgcgtggtcgtttggcctagttgggtcgcaacaattgtttcactatgagttgccgccatgagatcagtggcaagtgtatggcggaacttgtgtggtgtgagacgcacgccaaatgcttcagaatacttcgcgactaacttttcaatggcatagttgctcatacgcttggcgctgccacgatagcgactgacaaataaggcttgttcattatcttcttttagatagcgtgatttacgaatctggcagtaatcccttaaaaaaggtaaactccacggagcaattgggacagtatcttgctgtccgcctttacggatcacggtaattgtaagttgttcaagattcaaatcgttgatgttggcttgggccaactctgatagtcggatgcccgttgccagcgccagtacacagatggcaatatcgcgttcgcaattttgcttgtatgatgccagttggcgattagaaagcaagttagggtaatcaacttgcatgaaggtgatgaagtcgtgtttcttttcaccggtcagcagttgtttgctgatgtgtcgtgaacgtgtcgccattgtttctgaagctttaagtagtttcaccttcttcatgacgtttcggtaaaaataaggctcaccatcagcttgttcggcttcaatggttaagaagtaccagagcgcatttaatgcgttaatcgagcggttaacggcttgaaaggagagcttatggttattttgtttacgcttattcattagaaaaatcttgtagagctcaatatcttcgagtttcattttttcgagtgcggtcagtggcatctggtcgatagaggggaccgcgacgatctgttcatcaactaaccaggtgaaaaagcgaacgtattcttgtaagtattgatagagcgttgcagaagagtaggcgtttgcctggcggttaatgtagaatttacgaatgtaatccggaagattggcgagttgcttttcgcagagttctaagtaacgttgttgatccatgatggaagactccttaattaacagtttaaagatagtttagcaaaaatgaggtgagaatactacaagtgttgttaaaaccataattttaacaacacttgtattgcaaaccgttccgcaaactgatgatcagatggtcttattcgactatctgcatagcaacctaaagatccttattccgtttaaaagctggtatatcaacgtttaaggccttttttaacgatttgatatgtgagttttaaggctaagatgtgttaatatgcgtatttaccaattaaaatctggcataatcgtcagattaatcacggatttgtgcctgagcttagatgaattctgcatttaaagttaagtttggcgatatcggttggccagtcagtttgattcatcatattggcgttgagtaacttgtaatagtttatgaatcgtgcagtgtaaaaaacaaacgcgttaagtgcggttcatcaaatcaattgaatgatgttggataataagtggttattttagcgctctttcaagggataagtatttcttcgcataatatatattatgtaaactaaaatagatttaaaaaattagctaagcctacccactcgtcaccagcgtttaagcgcagcaaaaaagcgccatattaaaatgacgcttctgtaattagtgatttaaaaactgagccaacaaagctgcaaagtcatttggattttggaataacgccatatgaccagcatctgggtaaagttttaattgggaatttaaaattcgttcatgtaattcatatgaaccattaacaggtaccattcgatcgtgatcgccgttgacaatcaatgttggttggttaatttgtgccaggtttgccggttgatcgtgcgcatactgtttaattgctattaattgacgacgataagcggctaacgtaatggctttatcttcaacaatttcacgctgttttaaccggttaatgaacgctttaccagcctgtttgccttggggcgttctggtgaagaagaggtattccttaacgtctctatgcgttaagaaggactgaattaagtcaaaagttgttatgcgccccactttggcgatttctgagtcaccctggggacctgttccgactaaaattaagtgattaacgcttgaggagtattttaaagtgaaggcctgtgcaacaaaaccacccatcgataatccaagtaaatcgaattgagtgagctgcatagctgttataaaagcataacaatcagctaccatttgctcaatcgtcgtggggactttgccatccgagaaaccaacaccacgattattaaagacaatcacgcgtcgttgctgactgatcaggtcaattaatgcagggtcccagttatctaaagtggctgataagtgattcaataaaacaagtggtaagccgcgaccggtacccacttcgcggtaagcaaaccgttggccttgttgatcttgaataaattggttgggggttgttagataagtcatcttgattagcccgcttgaaccttaatcaccactttaccagtctaatataaacgattcttttggatggccgtgagcaacaagttctagtgcctctttaacgtgtgctaaatcgaattgatgcggatcgatggctggtacaatcgcttgttgttcaataatttcagtgatttttttgagttgggcaccatctgaacgaacgaaaataaagcgatattcaacgcccgcttttttagcgaggcgatcccatttccgcccggccaacgagaataagagttgcttccaaaatggtaattgcaattgtttagcgaattgtttgtttggaccggcaatcaagcttaaaatccgcccgcccggcttcataatcgccatttcacgttcaatatctgctccaccgcgtgtatcaatcacgtaatcgatttgatctaaaacttcccagtaatcggttgttttgtaatcgatatattggtcagcacccaaattcaaaatgtgatctcgcgcgactgcattgcctgaaacaatcacggttaagcctagtgattttgcgattgggatggctatttgaccgaaaccgcctgaaccaccagggataaacagcgttcggttcggttgggctgccaattcctcaaatagcccctgataagccgttaagccagtcagtgggattgcaacggcttcacgtagcgataaatcctttggcgtgtaccagattgcatcggtggtaaccgcgacatattcagcaaagccaccgattttagccaatggtaaacgcgcatagacttgatccccgactttgaaatcagtgacgtctgttccaatcgctgtgatttcaccggcaatttcattgcctaaagtcagtggtaaagtatagttttgcattaatttagtatcgccgcggatattcattggatccaatggattcaccgctgcataggcgactttgacgagtacttcattggctagcggttgtgggcgatcaatttcttgaatcgtgacagctagtgtttgattatattttttaatttgagctgctttcatattagaaaacctctttccacgggagtgtttgtagggtttgttgcacaattgctgttagcgtagttgaatctgggttcactttagccatgacccggataccaatgagcgcactttgaagcgatgcagctaaaagatcaattgcaacagacggttctagttcggcctggccggcaatcagtaatgcctgcaacagtgctttttcttgggttaaataatgctgaatcagcgtttggatgtctggttctaatgaatttaacgttgccgcggtattcaccactaagcagccggctggttggttatccggatggtcaataaatatttcaaaaatggctgttaagcgcgaccttaaatcggtatgtgttgccagtacttgctcgaaacgctcgttaatttggtcacgataatgtgctagtacttggataaacagttcatgtttatcgccgaatgtatcgtaaatactgcgccggtgaatccccattgcatcaactaggttttgcattgaggtattctcatagccttgttgccaaaagacaagcatggctttgtctaagacaaccggtgcttcaaatgtttttgtccgcatctggatgctcctctcttattagaacgttcattgaaataacgcaactagattttgcgcaattttaaggggcaataaaaaagaacgcctcgaatgagacgttcttgtcagctgttattttgtccgatagaaaataccaaacgcccctaggccaacgtgactcataatgaccgggctggttagtgcgactgtataaggcacatggggctgtgtttcttcaagcgttgcttggatcttagcggatagttcatccgtgattccgacgtgtgagatgccgatttccgcaacgtcttgggtggctaagtattcacggatattgttgagttcttttgtaaaagcttttagtccccgcccctttgcgacgacttctaattccgtatctgttaagcgcacaattaccttgagtttaatgattttcgttaatagcccggccattctactaattcgaccaccgcgttgaagcgcgtcaagtgaatctaaaaagacgtaggtttcggttttacgacggatgtcatcgagatgcgcgataatatcatcaagaggcttccctgcttcaacgtcttgggcggcagcaaccacttgataagcaagtccacggtcgattgctttactatcaatcacgtgtacgtcacttgttgattggtgggctgctgtgtgtgccccttcgattgtgccacttaacaagccggtacaatgaatcgatagaatcgtactaccatcagcccctaattgatcatataaatcgacgaaactgccgacagttggctgacttgttgttggaaaatcggtcgttgcattttgtaagcgacttaaaaattcagcgcgggtaatggtttgtccatcaatgaaagactcatttccttgttgaatcgttaaggggacgatgtgaatgtcatatttagcgcgttcgtctgctgtcagttgaatcgatgagtccgttacaattttaattgtcatatgagttgtactccttcaagttaaatgttgaggtaaattgaaaaaaacatcagggtcgttccgagcattacgaaaaagtgccaaatcaaatgtaagccaggaattttaggaaaactataaattagagcgccaacggtaaagactacgccaccactgactaacagccaaaaaccaactggactgaggttgacataaagggtcttaccagctaataaacataaccaccccatcacaacgtaaatcgttgtttcaatcttttggtaccgaccgtggctcaaaatgtgcgttataataccggcaatcgctagtgtccagattgcaatcagtaagctaattcctgttgcatggccaataaaaatcaaacaatatggcgtgtaggtaccagcaatcagcaagaaaatattgctatggtcgaatatttgaaacacgcgcttggccttggtaaatgctaagcagtgaaataaagtcgaagcgagatacagtagcagtaatgtggcgccatacactgctagactagcaatcgcgactggtgagagtgttttatgaatgcttttgaccaggagcatgatgactaacgttaaactaccgaaaaaaccaatcccgtgggtaatggcattccatatttcataaatcagttgttgtcgtttaatcgtggaaagttgcatggttctcgcctctttttctctatttgccgagtattatagcgcgaatgtagattataagtcaatagataatagaattcgattctatgttagtgacaaatgataattgctatggcataataaatatactatcaacagattggtggcgttaatcagtatgcaatcacaagaatttgaaaaatggttgggtgactttcaacaattgcggttaccattatggtctgaatttccagatttagacctctatatggaccaagtcattagtgaggtcaataaacgactgagtcctttgttggacgttaaaataacgaaaacaatgattaatagctatgtcaaaatggcgattattgaacgaccggaaaagaaacgctataatcgggatcatttagccgaattgattgtggtcagcattatgaaattagtcttcccgctcgatgtcattaaacaagggatttcgcaatcgttggcaaacgacaccgctggtaaggcatatgatcagtttgtgcggttatttaatgccgaaattgcgaatattaacgcgcaatcaacggttaatgaattcaatttaaacgaggaaccgctcaacattgttcaaaaagtagccgttaaatccgttatttataagctaattgggacgaagttggttaccttagaagaacccgtttctatcttataagtcacaaaaaaagcctgtcgaattgttcgacaggcttttaaattaggctttatcaaaatctttaatccaagcaagtgcaatggctttttcaccaagatgggtcccgataactgggccaaagtagctgatatcaattggtaagtctggatagtttgcttgaagcttatcacgccatgcaatcgctgctggttcatcgttagcgtgaatgattagtgcgcgtaatggatagtcaacacgttcggctgtttcagcaaaaatttgttcagcgcgggcgtaagccttcttcaatgaacgaaccttctcaaatgccgtaattttgttagtgtcagcgtcaaacgttaaaagcggtttaatcttcaacatgctaccaataaaagcagatgcgtttgataaacgaccaccacgcactaagttttgtaagtcgttaacaatgaaacattcatccattgtgctttttagatcgtcaaggcgtgcgataatctggtcgacggtcacttctgggtcgcgtgccattctggccgcttccattgctaagtagcccattaacatcacagtaatccctgaatcgtatgggacaacctggatgttatcgatggtgcttgccgcatttttcaatgtcgtgacaaacccagagatggtactagcaaggtggatgctgatgacagcatcatacccttcgttgccgaggtcttcgtatagttttaacatttcacccagtggtggttgtgatgtactggggaatgtttcggatgtttttaatttttgatagaactcttcagtggttatatcaacgccttcatcatagacctggccatcaaggataaccggaataggtacgacgaagagatgatggtctttcacttgctgttctgtgagataagcggtactatcagtgactacagcaattttcatggtgacacctacttttttattattcggtaataactatatcataaatggtaggttaattcccctaaaaatgccgattttccgaaaaatgtatagggcgtctcattttaatggtcgattaaagctttgataataacggttcagtaggatttttaaaagttgctgttcatcggtactccagttttgttgaatgtgattttcaagtgcagtttgaagttgttgcaacgtacttaatgccgtcttggcggtcggtgttaaggcgtaaacgcgttggcgcggatcagccccggtcacttttgttaacagcccttcttgagccatcgtatttaactgccgactgagtgtcgatgcatcgagtttggttaacgtaattaattctgcgtgcgaaatgcgttcttgatcgggttcaatggccattagaatgttgacttgggctaacttcaagtcgagtcgtagcgcccagtgtttcttttgttcttgatacaatagattcagttgattaaacgttgctgaggttgagcgcacggtaaatccccctttaattgtataaagcaatttgataattgtattatacaatagtcgtgttagcgattgcaaacaactaatttctttgaggttccactgcaaaaccgttacaataagtaagacaattcaattatagagagtgtgagcaataatgacctttgatggtttaatgacccacgccgttgtaaatgagctaaatacaactttagcagacggcaaaattacgaaaattcaacaaccttatccaaacgaagtaatcttaacgattcgggcaaatcgtaagacctatccccttctcctatcagcccacccatcttatgcgcgagtgcaagtgacgcgggtgccttatgcaaaccccgcaacgccaccgaacttcgcgatgtctttacggaagtatttagatggcgccattttagaaaacatcgagcaaattgaaagtgatcggattctaagattcacctttaaatcacggaatgaactgggggacttacaacaactatgcttaatcgttgaattgatgggccgccatagtaatgtgattttgattaatcaagcgaccaataagattctcgatttaatccggcacgtcggtgtttcgcaaaaccgttatcggttcttaatgcctggcgccgattatgttaatccaccggctgcaaccggggttgatggttttacgactgatttaaagacgcttgattggttaagttattataacgaagctgctgatgaacaagtcaaatggttacaacaacacttccaagggatgagtcatgaaagtgccgttgaactacaaacccgtttaatggatcatgacaattatttggcggttgtgactgatttcttcaagcaattcgaccaagtgacaccaacgttaacagttggtgacaagaagtcgtggttcacggccttcccttatgagagcctgacagggacactgagccattttgacacgttgagtgagctgttagaccaatattacttacacaaggcgcagcgtgaccgagtgcagcaacaaggtggtgcgctcatccacttcatccgcaacgagattcaaaaggatgaaaagaaactgaaaaaactacaaaaaacgttaaaagcagccgacagtgcggatgattaccggattaagggtgaaattttgaccacctatttgcgggaagtcgaacgtggcatgactgaagtcacgttgcccaatttctacgacaataacgaaccgcttaagattaccttgtcgaaccagattagcccttcaaaaaatgcgcagaagtatttctcgaaatatcagaagctccggaattcaattgcctacgtcaatgaacaaatggcaaagaccgaagcagaacttgcctacttcaacacgattatggcgcaaattgaaattgctgaacccaaagatttagaggatatcaaagctgaattacaggctgaaggttatttaaaggctaagaaaaccggtgccaagaagcagaaacgttacaagattagtgaacctgaagttttctatgcgagtgatggcacccggattttcgttggcaagaataactatcaaaatgatcaattaaccttgaaaaaagcccataaaactgatatctggttgcatgtgaagaacattcccgggtctcatgtgattattgatagcccagatccatcagaagatacgcttcaagaagccggcaacttagcggcctacttctcgaaggcgcgcttatcagcggccgtgccagttgattatattcaggttaagaagattaaaaaaccgaacggtgcgcgaccagggtttgtgatttacgaagggcaacaaacactttatacgacaccagacgagcaactcgttcaaaagctacgtaacaaacctgtgcaagactaataaaaagcgttactccaaagtgaattggggtaacgcttctttgattggtgcggctgatggcacacgctaaacgtgttctgcaagccattactttccggttaacactctattctaatgggcgtctgaccatgcttgtgggtcttggcgccattcattgagtgatgtggcttgttctggagttaagttatcagcggcttcttcgaccgctaataaggcggagaaattcgataaggtcgttagtggtaagttagcagttgcgaaattctgttggccggctgccagttcgtatgaaaagatgccaaaaataccaaggacttctgcgccctctttttgagcggcagccgctgcttgtaagacactcccgccggttgaaattaaatcgtcaatgaggactaatttttgaccggctttaaacggtccttcgatttgacggccttgaccgtgatctttcggtttcgaccgaatgtaaaccatcggtaagtcgagttcggctgcgacccatgcagcatggggaatccccgcggttgctgttccgccgatgacttcaacgtctgggaattgcgctttgattgccgcagctaagttgctggcaatgagcttgcggacttttggataaccaatcgttaaacggttatcgcaatagatgggacttcttagcccactcgcccaagtaaaagggttgttaggactgagactgacggcatgaatatcgattaaggcttgtgcgacttggtgtgcaattgttgtcatttgaaagactcccattctgatttgatagcttggtaagcttgatatggatttgtagcttgcgtaattgggcgcccaacgacaatcgccgagctctcagcttgtgcggcttcgtgtggtgttacagcccgtttttgatcattggtttggcttgttgctggccgaatcccaggtgtgacgcagagaaaatcagcattggtgtgttcgcgaatcgttggcacctcttgagcggaacagaccacgccatcgcaatccgagttctgtgcgagttgcgcatagtgcgcgacagattctggtaggctgacattaacgagttgttcggtttgcatttgcgcttcgctggtcgacgtgagctgcgtaatcgctagtagtttagcgggctgcacgttggcgagtgcggcgccttttttcagaccagccgcccctgctttgagcatggcctgcccaccagctgcgtgaatcgttgtgtaatcgacaccgagttggccgattacagtcatcgcgctttgaaccgtgtttggaatgtcatagagttttaggtcgagaaaaatccgatagccgcgcgcttttaacgttttaatcagctgtggtccctcttggtaaaaaagttccatgccgactttaacgaataaggattcatcagttggaaattgtgctaaaaaacgattcgttgtttcccagtttggaaagtcgagcgcgataattaaggggttagtcatgagtgccctcctgtggtagaccgaatgattttaaatcggttagttgatatttagcgagttcatctggtaatgcggcgattagctttggacaggcaaatggatcgctgaaattagcagtgccgactgcgatgacattggcgccggcggccattaattcaagtgcatccgcagctgttgagacaccgcccatcccaataatcggtaacttcgaaattgaacggacttgatgaatgagccggatggcaacgggcttaattgctggcccagataagccgcccgtttgattagcgagaattggttggcgtgttctcggatcaatccgcatccccaccagtgtattgattagcgagaagccggctgcccccgctgcttcgactgcttgcgcaatcgggcgaatatccgtcacgtttggtgagagcttcacgtaaaccggtacttggctgactgcaacacaggcctttgtcaacgtggcagcggcttctggtgatgtaccgaattcgagaccgccatgggccacgtttggacatgagatatttagttcgatggcatggacgttgggtgcctgactgatgcgttcacagacataaacgtaatcggcttcagtattgccagcgacattggcgatgattggtaactcgggataatgctcggctaaccagggtaatttttcttgcataatgacttcaatcccgggattttgtaagccaatcgcgttcaacatcccacttggggtttcagcaacccgtggtgtcgcattgccaagtcggggttctttcgttgccgctttgataataattgcgccaagttcgttgaggtcataatagcgaccgtattcctgaccgaagccaaaacacccggaggcgggcataatcggattttttaaagctaagcctggtaaagttactgctaagtctgtcattaaatgagcacctcgtttgttttgaagacgggtccgtcatcgcaaattttgagctgaatgcttggatcacgtttgagtttggtgacacaggcgtagcaggcaccaatcccacaagccatccgttcttccaatgagatataggcattgggatgctcactgaatcgattatcgacggccattaacaagccttttggtccgcatgcgtaaatagcatcatatcgggttgtcgcatcagcaaactgtgcatcgagtaataaaccaacatggccttggtagccgtacgagccatcatttgtcgcataagcgactggcccgagcttgcgaaagtgatcttcatagaaaatggctgctttagttgcaaagccgaacacgtgttgaacgtgaacgccttttgcattaagttgccgtgagagttcatgtaatggtggaatcccagtcccgccaccaatgattagcgcgttttgtccggctactaattggtcaattggataaccgttaccaagaggccctaagacggacaagcttgtgctcaccggtgattcacttaagatcgtggtgccttcaccaacaacgcggtataacaaggtaatcgtgttagtttggcggtcgacgttggcaatcccaaatggccgacgtaataaaagggcgtcactggggattttgatatcgacaaattgtcccggtgcaatgggttgctgtgcgaggtctccggtgaggcataattcatagatactgggggcaatttcggtttgcttagtgagggttaattggtattctaatggcaacatttagcagactccttctgatttttatgtaataaaagagccttaggcaaagggcttcagactcttttagtggttttaaagtggtttggtcaggagcgattgagattctaggaccgctaagatcgcatcagcggtatccaatgaggtcatcaatggaatgccgtgttcaatggcggtttggcgaatgacgatgctgtctttagcgacttgtggggcttcgttcaagccggttgtgttgatgaccagttgaatgtggccggctttgattttatcaagtaaatcgccgctcgtagcattaatcttggcaacggattgcactggcacacctgctgcttggaattcttgactagtcccaggcgtggcaatgatttgatagccaacttcgcggaagcgttttgctaattcgagcgcttgtgtcttatcttggttagtaattgtcattaagacgttcccgtgacttggtaagtgcatcccactagcttcgaacgctttatagagtgctttttgcatcgttacgtcagttcccatgacttccccggtcgatttcatttctggcccgagtaagctatcaacccgcgtgagtttcgagaatgagaagacaggtgctttaatatgaattagtgggcccgctggtaatagaccggttgggctctttaattcagctagtgtgctgcctaaaatgacttgggtggccagttgcgccatcgagatgccggtgactttactcaagaatggaacggtccgactagcccgtggattgacttcaatcacgtagactgcttcattttggataatgaattggatgtttaacaagccgcgacattcaagtgctaaacagagcttggtcgtgtaagtgatgatggcttgtttttccgcatccgtcagattttgtggtggataaaccgccattgaatcgcccgaatgaacaccagcgcgttcgatatgttccataattcccggaattaagacatctttgccgtcacagatggcatcgacttcgcattctttgcccattaagtagcggtcaattaggaccggttggtcgactgaaactttaacggcctctttcatgtaatgtgtaaggtcttctgcagtatgaacgatttccattgcccgcccgcctaaaacgaaactaggtcggattaagaccggataaccaatctcttcagcaatcttcaacgcatctggcgtattggttgcggttgccccgactggttgtggaatgtcgagttcggcgattaattgatcgaattggtcacggtcttcagcgcggtttaagttcgcgacgcttgtcccgagaatctgcacaccattttcggtcagtggttcggcaaggttgatggctgtttgccccccgaattgcacaatcaccccttctggtttttcgagttcaacgacgttgaggacatcttctagtgtcagtggttcgaagtacaatttatctgaaattgaaaagtcagtcgaaactgtttctggattactgttcatgataattgcttcgtagcccgccttttggatggcttgcacacagtggacggttgcataatcgaattcaaccccctgcccaatccgaattggaccggaaccaatcactaagattgaaggctttgtgctgacaatgctttcgttttcttgttcgtaagtcgcgtagtaataaggtgtttgtgattcgaattcggctgcacaagtatcgaccatcttataaactggctgaatgccactttcttggcgcatttggcggacttgggcaggcatgatttgccaagttgcggcaattttagcgtcggcaaagccatttttcttggcgagttcgagtaattctaagtcacctttatcggtccggagttgttcttcaatttcaacaatgtggctgagtttatccaggaagaaaagatcaatttttgtcaattcactaagttcttgaattgaataaccgcggcgcaatgcttcggcaaggtagaaaagtcggtcgtcttggggatgtacaatccgttggacaaggtcgttatcaccgactgccgtcaatgctggaatttcgagatggtcagtgccaatttcaagtgagcgaacggctttgagtaatgcttcttcaatgttgcgtccaatggccatcacttcaccggtggccttcatttgggtgccgagttgccgatcacctttgttgaatttatcaaatggccaacggggaatcttcgcaacgacgtaatcgagcatcggttcaaattgcgcataggttgtcccggtgattggattatgaatttcatcaagtgttaaaccgatggcgattttagccgccatttttgcaattggatagccagttgctttagaagcaagggctgatgaacgactcacccgtggattgacttcgataatgtagtagcggtcgctattaggatcaagggcgagttgaacgttacagcccccttcaatcttcaaggcgcgaatgattttaagtgcggcatcgcgcaatgcttggacttcacggtcacttaaggtttgaacgggtgcaaatacgatggaatcgccagtatgaatcccgactgggtcgaagttttccatgttgcagacgactagcgcgttgtcatttttgtcgcgcatgacttcgaattcgatttccttgaaaccggcaatactttgttcaacgaggacttgtccgactggagataggctaagcccgtttttgacaattgtgctcagttcaccggcattttcggcaatcccgccaccagtgccaccaagggtaaaagctggacggataatgaccggatacccgttttcgttaacgaatgtttgggcttcaacgagtgaatgggcaatcgcagattctggaatcggttcgtttaactgattcatcaagtttttaaacagttcgcggtcttcagcttgatcaatcgcgctgagcttggtaccgagcaattcaatgttcagctcggcgagaatcccgttgtttgccagttccaaagccatatttaagccggtttggccgccgagggttggtaagatggcatctgggagttctttgcgtagaatttgcgtgacaaagtcaatcgtgatcggttcgatataaaccgtatcagcaacggctttatcagtcatgattgtcgcaggatttgagttaattaaaacgacttggtagccttcttctttaagcgctaagcaggcttgagtgcctgagtaatcaaactcggcggcttgaccaattacgattgggccagagccaatcactaaaattttatgaatatcggtacgttttggcatcactaaatcccctttttactatttttggcggcgattgaagtcatcgatcatgtcgataaattcatcgaatagatgtgcagcgtcgtgtggaccaggggctgcgtctggatggaattgaacggaaaaggccggatattgtctatgacggagaccttcgactgtttgatcgttaatttcaacgtgtgtaatcagaaggttttgtgggtcgatggagtcggcatccacggcgtacccatgattttgagatgtgaagtcgatccgtttggtggcaacttctcggaccggatggttgaaaccacggtggccgaacttcatcttgtaggttttagccccattggcgagggcaaaaagttggtgaccgagacaaatcccgaaaatcggcactttaccttgaatccctttgatcatttcaatggcttctggcacatcttctggatcaccagggccgttggttaacatgacgccgtctggatcgagactcagaatttcttcagctgttgtgttgtatggtaagacagtgatgttacagtcgcgttttgacagttcacgaaggatactatgttttaagccaaagtcaatcacgacgatgttccgcccgttagcaggactcggataaggtttggccgttgagacttgttggacttggttttttggtaagaccaatgccttgagttgatcgaacgcgtgatcgtctgcggcatcaacgatgctggctttcatggtccctttatcgcgcagacggcgagtgagtgcccgcgtatcgatgccggcaatcccaggaattttcttttgctttaaaaagtcatcaagactcatattcatccgccagttatttgctaggcgtggtgtttcatggacgacaacccctttacaggttggtttaatcgattcaaagtcgtcgcgattgaccccgtaattaccgattaaagggtatgtaaaagcgatgatttggccgttgtatgattgatcagtaatggtttcttggtacccactcatcccggtgttaaagacgatttcgcctgtcgagataattggggcgccaaaaccggtgccggggaagatggtgccatcttctaaaataaggtaacgtttcatcttttagttcactccttttgatatgcaatctgaccagcaaccaaggttaataaagtatcaccttgcactgcttcgccgataaatggcgtgttgtggcctttcgataagaaagtgtttgcgtcgattgtggtggtatccgttaaattaaaaacagcaaggtcagctggttggccaaccgctaactggccggcgtgtggtaagttgaaaacatgggccgggttggttgttagccagcttgtcagttgcgcgagactaaatggaccgttggcaactaaatgtgtgtataacaagctaaaggctgtttcactccctactataccaaatggcgctttcaataacgactgttgtttctcttctgtggtatgcggtgcgtgatcggtcgcaataatatcaatcgtcccatccattaagcccgcccagagtgcttggcgatctgcaagtgttcgtagtggcggattcattttgagcattgcgttgtcactggtaatcgctgaatcatcgagtaacaaatgatgtggggtgacttcgcaagtgacgttgaggccatcttgttttgcgcggcgaacgagattgacggtttccttagttgagatgtggcagatatgataatgaacgccggtcgcccgtgctagctcgatatcccgggcgacttgggcggattcactgacactcgcaattccgggaacgcctagttttttagcggcttgaccgtcgtgaatgacgccgccgttgacgagtgattcatcttcgacgtgcgcgacgatgggcatgttaatctgggcggccatctgcatcgcttggtacattgtttgtgccgtttgtaccccatgaccatcgttggtaaagcctgctgcaccagctgccttaaacgccgacatgtcgacaattgtttgttcagttaactcattggtaatcggtgcaaattgatatgtgtggacgctggtttctgcctgattgcgtgcaaccagtgtcttgaaatctagcaagttatcaggtacgggctttaagttcggcattgcaattacgctagtaaaaccaccgtgggcaaccgctgtgctccctgttttgagtgtttcttttgtcgtgaagcctggatctctgaagtggacgtgtccgtcgattaagccggcactgacgaaatggccgtgtgcgtcataaatcgtttctgggtcggttgggactgcggtaatcgttggttcaattgccgtaatctgaccggttgcatcgatggcgatgtcgcgtttttgcagttggccgtcaatcaagacttggccgtttttgatcaattgatacatagcagatccccctcttaatgttgaatcagatgttgttggtctaataggtgttcaatgatggccatccgcataaaaacgccgttggtcatttgtttaaaaattcgcgattgtggggcttcaacgagttcgtcggcaatttcaacgtcacgattgacgggtgctgggtgcaaccagatagcactggacttaaggtgtgctgcccgctcagttgtcaaaccgtactgagtatggaatgcagtgtcagataaggtttcatcggcagcaaagcgttcgtgttgaatccggagtaacatgacgacgtcaacttctggtaagacgtcatcgagttgggctggttgtccgtattgggcaaattcaggggcgaaccatgcctcagggccggcaaaatacaatgttgcgccgagttgtttgagcagttgcatatttgaccgtgccacccgggaatgacgcaagtcaccacagatgacgacttttaagcctacaaagtggccgaactcttcgtgaatcgtcattaaatcgagtaagcattgggatgggtgttgcccactcccatcgcccgcattggccagtgccatgtggaattgatcatctgcgagtaaggcgtcgtaataattattctgagaatggcggacagcaacgaaatcgacgccaatggcttgtaccgttttgagcgtatcgctgagggtctcgcctttggaagtcgaactcgtatcggcattgaagtctaagacggtcatgccgagtttgcgttctgccatttcgaaactcgtatgggtccgtgtgctattttcaaagaataggttcattgcgtagaccggccgagttaatttgcttgtcgcgccctttttaaaggcgctagcgcggttgatgagacctgcgactaaatcattggtgagttgatcaacggaaaccaacgcgttatgcttttgcattttgttgagcctccaattcaagttcgctctttgctttatccggtaaaacaaggtttaagacaatcccaaggacggtggcgatggctagccctgagaattggtattggcctaattgtaagtaggcattgccaatcccgatgacgaggattgatgaaccaatcattaagttgcgtttcttatcaaaatcgacttgtttgtcgattaagacgcgcaaaccgcttgaggcgatgaccccgaagagtaagaagctaatcccaccaattacgggtgtggggatgctttgaatcaacgcgctcagtttgccgatgaagccgaagatcatggcgaagaatgcggcgccacctaagacccagacactgtggactttggtgatggcgaggacaccgatgttttcaccataacttgtgacgggcggtcctccgacaaaagcggcgatgattgaggctgtcccgtccccggctaacgtgcggtgaagaccaggatctttaaagaagttacgcttggtgagtttgtttaagaccataatgtggcccatgtgttcggtcattgtgacaaaggcaattggtgccatgctgagaatcgcgccccagtacagaccgggtttgtaagtgacaaatgggacttggaagtctggtactttaaaccaaggggcgtccatcacgggttgaaaatcgacgatcccgaacaagacggcgatgatgtagccagcaatgatgccgagcaagatggggactaagctcatgaatcctttgagatacatattaaagccgatggtgattaacaacgttagtaaagcgactgcgaagaattttaagtcgtaattcccgtgggcattgatagtggcttgtttggcagctgtgccagcgagtgataagccaatcaccatcacgattgggccgacaacaatgggtggtaaggctttgtcgatccagtcggaaccaatcagactgactaagattgaaacgattaagtagactgccccaaccgccattgtcccttgtgcaatcccagggtagccagtcgttttcatcaaagcgagcattggcacgatgaatgagaaactcgaccccatgtatgctggaatcttgcctttggtaatcaagaggtacattaaggtgccgaccccggaactgaataacgcaatccctgggtttaaaccaactaagattggcactagaacggttgagccaaacattgcaaacatatgttgaatggataaaccaatccatttaccggtgctggggcgttcgttgacgtctaagaccgcatcgggatttctaaattgtgtagccataagtatttcctccatgtcgccgactttttgaaccaaaaaaagacacacgctccaacagattggtaggtgtgtcccttgacggacttaggcccctttttttaggcgcactaagttcaagacaaacccttttgctctctctggagacaattaaacggttcagtcgttatttagttagtttttcgatggtaatcccatcatgttgatcaatttcttccatcgcaacgcgaatttgttcgttgagggcggttggaatatttttaccgacaaaatcggggcgaattggtaattcacgatgaccacgatcgactaagacagccaatgaaattttctttggccggcctaagtccattaaggcgtcaagcgcggcccgaatcgtccgccctgtgtaaagcacatcgtcgattaagatgacatgcttatttgtgatatcgacgggaatatcgctcccgttaatctgtggttcattttgtgtatcaagatcatgttgatcatcgcggtataacgtaatgtctagtgtaccgacgggcaatgcgatgccttctaattgttcgaggcgttctgcaatccgttgggcaataaacacgccacgggttttaatgccgacgaggacgagatctgaaatccccttattctgttcgataatttcgtacgtaatccgagtaaagacccgtttcattgtgttactgtcgaccacttctttgaccatcgtaaagactccttccaaacaaaaaacctctcaaaccgataaggtcgagaggttacagttagagactccgcgtctagtggtgctttcaccgtaccttctcggcctcacgggaccgattttaaaggcttctattaagttagacctagcttaacggagaatccttgatttgtcaatgattttcacgtaattcggttaaagttttctcgaagattgcgggtaatggggcttcaaagcgcatcatttcgcccgtcgttgggtgcttaaagcctaatacagcagcatgtaagaactgaccatgcccagctaaagttttgcggggaccataaacgggatcgccagcaactggccggttaatataggctaagtgaacgcgaatttgatgggtgcgcccagtttctagtcgacatttgattaatgtgaagtcttcaaaccgttccatgaccgtaaaatgcgtgaccgctgggcggccatcttcgacgattgcttgtttcatccggtcgacttttgaacgaccaatgggtgcatcaatggtcccctcgtcttcttcgatgttgccgtggactagcgcgatatattcacgtaagttttccttagctttgagttgggcggataaagattcgtgggcttcgttggttttagccaccatcaaaagaccagaggtatctttatcaattcgatggacaatccccggccggaagacgccgttgatttcagacaatggggtgtgcgccaataaagcgttgaccaatgtcccattcgggtggccagctgatggatgaaccaccatcccttgtggtttattgactacgaggacttgatcgtcttcatagacgatatcgagcggaatatcttctggggttaagtcgagcgtgacagggtctggaatattgacggtgacgacatcccctgttacgactttgcggttactcttacaaggttgatcattgacttgcaccaagtcttttttcaaccattgctggatttgtgaacgtgagtaatcgggtagtaattgggtgagcgccttatcaatccggcctgtttcagttgtaatcgttaattgtttagtttcagtcatgagtcactttctctttcaacaaaatagcaataaagacgcagatgacgcctactgttaaggcaacatccgcaacgttaaagatggggaaattaataaattcgatttggaacatgtctacgacgtacttaaggtggagccgatcgatgaagttaccaagtgttccggctaacagcaacgttaaaccgatccggtaaaatttttcagtgcgatcagaggtataaaataagtagccaattaccccgagggccacaatggtgacgaggtagaaaaaccactgttgaccggccaagatactccacgcagccccatcgttttgaacatacgttaaactcagcacgttcggaataacgggttgggttgctgcaaaggcaacatggacaacaatccagctttttaaaagttggtcaccgagtacaatgactgcggctaaaacgatatagatgagcatgggaacctcctattcatacaatctaccattgtccttaaaatcggctgacttgtcaatcagttttcgagatgggcgttaggatattggaaaacgtgcttttcaagctaactttctgcgcttaaccaaatttgccaaatcgccgattgtatcggcaattcgtcaaattctattaatgctcagaagctaaccgtttcaaacgcactctagaataatccgctaatcaggccatcttctgtgacgtccatgttgagggcggctggtttctttggtagacctggcatggtgaggactgtgccggtcattgcgacgatgaagcctgcgccaagctttggaatcaattcacggacgtgaacggtgaaatcagttggtgcgcctaatgcttttggatcgtctgagagtgaatattgtgttttggcgatacagactggtaagtggtcccagccatttttttcgatttctttcagttggttgatagctttgccctcgaaaacaacctctttaccgccatagatgtcagtgacaattgtggttagtttcgattgaatgtcggcgtttgaatcatataatggttggaagtttttaggttgatcgagtgcttctaagacggcctgggctaaatcaaggccacctttaccaccatgtgcccaaacactagctaaaacggctttgacacccagttcagcacatttttcttggagcattgtaacctctgcttcggtatcacttgtaaactcattgatggcaacgactacgggaatgccgtaacgttgcatattagcaatatgtttggctaagttactaaaccctttgtctaacgcaccgagattttcagtggttaaatcagctaaagcaacaccaccgttgtattttaacgcccgaacagtggcaacaatcacgatggtatcaggagtcttgccaagttgtgggactttgatgtctaggaacttttcagcacctaagtcagcgccgaagccagcttcagtaatcgcaatatcacccatttttagggccgtttgggttgctaaaatactgttacagccgtgggcgatattggcaaatggtccaccgtgaattaaggctggtgtatgttcaagcgtttggacgaggtttggtttgagggcatcttttaaaagcatcgcgattgcaccggtgatttcgagctcgccaactgtgacgggttgtcgatcataagtgtaaccaatgacgatttggctaatgcgccgcttcaagtcagtaatgtcagttgctaagcagagaatggccattaattcgctagcaacggtaatgtcaaaaccatcttggcgcggcatcccttgcactggaccaccaagtccaatgacaacttggcgtaatgcacgatcattaatatcaagcgcccgtttccaaataattcggcggggatcaatgttgagggcatttccctgttgcagatggttatcgattagggcggctaaagtattcacagcagcggtcaatgcgtgcatatcccctgtaaaatgtaagttaatatctgccattggtaccacttgggcatagcccccaccagttgcgccacctttcatccccatgacggggcctagtgaaggttcacgtaaagcaatgacggctgattgatctagttgacgaagagcgtcgccaagaccgacagtcacggttgatttaccttctccagctggtgtgggattgattgaggtcactaagatgagtttgccatcttctttttctttcaatcgattaatggcagcgaaattaaccttcgctttatacggtccatattgttctaaatcagcggccgttaaaccagcttgttcggcaattgccgtgattggctgcatctccttagcttcattttcctgtgctatttgaatatctgacataccgcccagctcctttttatttatgatactacctagtatagctgattacgtacggaattggcagatgggatgcttaaaaagaacgatattcttcgacacacttctttgtacgtggtaaaataagcgcgtacgctgattaacatttcaaggagggattgtgatggaacgaggaatcgttaagtggtttagcaatgctaaaggttatggcttcatcagttatggagatgacgaggaggttttcgtccattttaccgcaatccaaaccgacggctataaatcattgaataaagacgagccggtattatttgagattaaagaaggcgcccgcgggttgcaggcagctaacgtgcaaaagatagcagaataaaaatacgtttaaacgctaaaaaagagccacgacaagattaatgtttgtcgtggctcttttttatttaactattcttcaattggccaaccattttgtttcagttgttcaacgaatgcctgcttggctttgcgactaaggagtatttgttcgggttggtaatcaagttcgttggttttaattaataaaccatgtttttggacaataatggtcgtagtcgtttcacggttgatggttcgattatatttaaataccggccgtttaagcgtgatcacgtctgccgtcattgaaacacgatgcccgaaaatgacccatagcgtcaaccaaacggcaattaagccgatgccccacgattgccagtttaagttgatgagttcaagttgtacaattaaagctaatgtatagacgaagccaatccaagaccaaatcgtcacgaagtaagcataatttggttggtagaatgcggtggttgtcttttgcatgagaacactcctttttacgctttgtatcataccattaacctgaccctgctgtcagtgaaaggcggtaaattttaagaatgattaaactttatacggacgcagcaactcgtggcaatcccggaccaagtgcggcgggaattttaatcgtgacaccagagcgacaatatcaactacaagcacctttgccagaacagtccaatcatgatgcagaatttgcggcggtcattcttggcttagaacaactagccaatcgggggcttaccacgaaaatactacagattaacgttgacagcaagcttgtctttcagagcctagaaaagcggtatgctaaacattatcaagctgccgtcgaccggattctagcacttgaggcgccctattcaatggtcatccaccaatggattccagagcgtcagaatcagggggcgcaccatctggcccaacagggattacctcatttaactgactgttgataggcttaactagcgctttgagcgtgattttagtaaaataataagcaacgctagaattttggaggagtacgatatggttttagttacagaaataatgtcattcatcatcttcattaatgccttattggcaattattacaattttgagacagccccgcgatattgcggccacctgggcgtggctgctagtcttaattttactacccgtgggcggttttatcctatatatgtttaccggacggggcttatcgcggaaaaagattttccaaagtcaatcgcaaatcgatgatgggcttttcgcattggtcgacattcaacgtaaggaaaatcgtaaaaacgacctcttaccgaaaaagatgctttccagtgaagcatccgaaatggtgaatctctttttaaatattaataatgcacccgttttaaagaataaccatgtcaaaatctatactgacgggcaagcaaagtttgacgccctctttgccgacatcaaacaagctcaaaaaagtattcatatcgaatattatacgatctataatgaccgattgggcaatgagttacaacaactattgattcaaaaagccaaagaaggcgtttcagtcaacgttgtctacgatgcttggggctcccaaggcgcaacgcaaaaatggtggcgcgcacttgaagatgtcggtggccacgcgcgaacgttcttcagttcaaaacacacgattaccgattttcgcttgaacttccgtgatcaccgtaagattgtggtaattgacggtaagattggttatattggtggctttaacgttggcgatcaatatctaggccggagtaggaaattcggacattggcgtgatacccatatgcggattaccggcaatgccgtgttagccttacaagtacgctttatgatggactggaacgcgagtgttgagcctgcgattaagttaacttactcggaagaactcttcccagtggaccaatcccaaaatcgtggatcagcagccatgcaaattgtctcaagtggtcccgataaattagatgaacaaatcaaactcggttatctgaagatgattagtaccgctaagaagcgtttatggattcaaacgccctatctagttccggatgatagtattattgatgcgttgacgactgcggcaatgtccggggtggatgttcgtatcatgacgcctaacatgccggatcaccccttcatctaccgtgcaacggaatactacagtcaactcttgcatgcagctggcgttaagatttaccggtatgaagatggattcttacatgctaagacggcggtcatggatgggcatatcagcactgtaggttctgccaatatggatatccgtagtttcaagctgaactttgaagccaatacgtttatttacgatccgaaagttgcagcgcaacttgaagcgatctatcaggctgatatggaaaaagcatccctactaacagacgaaataatcgcccaacagtcaacttggttgaaatttaaacaaaaattttcacggttactttcaccaattttataaaatgttcgttaactcatttttatgatggtgcaatattaaattaaccccaatctaaaaaattttttaaaatctgttaagctttgtccggcgtgcttttgaaaaattttgcgcattagcagggattgactttacccataaatatgtttaacttaagtacaggacgttgcccaagacaatcaaatgaacattcgtaaacgaccactataattagtggtcgttttttgttttatctacaatatgtggtgtttattgattgcatcttccatttcaaaacggtatactatttttatcgataagagaaatacaagggagttaacgattatggcaaatatcacattatatactaagaacggctgcccacaatgccggatgacgaaacactttttagaaacgcacaacgttccttttgttgaacataacatcaatgacgaaccacaatatattgattacttgaaggaacaaggtttccaagccgttcccgttttagaagcggatggcctagaaagcttctcaggttttagaccagcggaattgcaaaaattggcgatttaagcaccatgcattcccagttttaacgggtgaggccgactcttgattactaaagagttggtcttcactttttttaaaccctaaaacagctaatatgactagaaagtggtggcaaggatgtctttaaaagagattaaaaccgaagatgtaacatactatgaattgaataaccaaattaatattccagtgaatggtcaaattccattacaaaaggatcaagaagcactcgatgcctttttggaacaaaacgtacaacccaatatggtgacgtttaaatcacttcaagaccgtctagattatttagtcgcggaaaattattatgaagcagattttttgaaggcttattctctttcattcatggaagaattgaatcaatatttaaaggaccaagacttccacttcaagtcatttatggctgcttataagttctatgcgcaatacgcattaaaaacaaacgacaatggcttttatcttgaagattttaaagatcgcgtttttgtgaatgctctctacttcgcagatggtgatcaaacccttgcgctgcaactagcggatgaaatgatccaccaacgttatcaaccggcaacaccatcgtttttgaatgctgggcgttcacggcgtggtgaattagtttcatgtttcttactccaaacaaccgatgatatgaattcaattggtcggacgattaactcggcacttgaattatcacggattggtggcggggttgggattagcttgtcgaacctccgtggagctggcgatccaatcaaaggcatcgacggtgcagcaagtggtgtcctccctgtcatgaagttattggaggattctttctcatactcaaaccaattaggtcaacggcaaggcgccggcgtggtttatttaaacgccttccatccagatgtgattgctttcttaggtgctaaaaaagaaaatgcagacgaaaaatatcgtttaaagaccctctcattaggcttagtcgtccccgacaagttctatgaattggtgaaagctgatgctgatatgtatttattcagcccttacggtgttgaaaaagaatacggcgtacctttctcatatgttgacatcaccaaagaatatgacaacttaatcgccaacgataacatcaagaaaaccaaaattaaagcccgtgatttagaaaatgaaattagtaaattgcaacaagaatcaggttatccttacatcgtcaatgtggacacagccaatgctgcgaacccaattgatgggaagatcatcatgagtaacctctgttctgaagtcctccaagtgcaaaccccgtcacaaattaataaccgccaagaatatgacgtgttagggacggatatcagttgtaacctgggttcaacgaatattccgaacatgatgacgtcacctgactttggtggttctatcgaagccatggtgcgtgctttaacctacgtcacagatcattctgatattgatgtggtcccttctgtggctcatgggaacgaattggcccacaccattggtttaggtggcatgggtctgcataccttctttgccaagaaccacatgatgtatgggtcagaagaatcaatcgactttaccagtaattatttcatgctcttaaactactggacacttgttgcttcaaataagattgctaaggaacgtcagatgacctttgccaactttgaaaagagtaagtatgctgatggtagttacttcgatcaatacgtcactgaagactgggcccctaagacggacaaagtcaaggcaatcttcaaagacatcatgattcccacaaaagccgattgggaagctttaaaactagccatcatgcaagacggtttataccatcaaaaccgcttagccgttgcaccaaacggttcaatttcatacatcaacgatacttctgccagcttacaaccgattgttaaccggattgaagatcggcaagaaaagaaaattgggacaatctactaccctgccccaggtctttcaaacgacactatgccatattatgaatcagcttatgacattgacatgcgtaaagttatcgacatctacgcagcagcacaaaaacatgtcgaccaagggatgagtatgacgctcttcatgcgttcaacgattccagtaggcctttacgaatggaaaaacggccggactgacaaaatgaccacccgggacttaaacatcttaagaaactacgcccaccacaaagggattaaatcaatctactacatccggacttacacagacgacgaaagtgaagtcggcgcaaacgcatgcgaaagttgtgtaatctagagtgcgtttgaaacggtttgactttgagcattagtctaactcggcgaataactgctataagcagttgtttgacgagtgtaactaagcgcagaagtcagtttcaaaaagcacgtttcaaaacagagtgcgacggcaggcgtttatattttgagcattagcatagggaagcgaattagcgaagtagtcgatgatttgattcactgggctaagcgcagaaagttagcttgaaaagcacgtttcaaagcaaacactaaatctccactccagctgctcgtcagctggcctacatacctaaaaaagaagcacgttaaaaggagttcatgaacatggcagaaaattatattgcaattaactggaaccaagttgaagatcaaattgataaagcaacttgggaaaaattaaccgaacaattttggttagatacgcggattcccctttccaatgacttagatgactggcgcagtttaccagacaacgaaaaatggatcgtcgggcacgtctttggcggcttaaccctacttgatacgctgcaatcacaagatgggatggccagcttaaaagccaatatccgcacccaacatgaagaagccgttttaaacaacattcaattcatggaatccgtgcatgcgaagagttattcatccattttttcaacgttaaacacaccaactgaaattgatgaaatcttcgactggaccaacacaaatgaattcttgcaatacaaagccaacaagattaacgatatctatcaaaacggcacacccttgcaacaaaaaattgccagcgtctttttagaaaccttcctcttttattctggtttctataccccactctattacttagggaacaataagttggccaacgttgctgaaatcattaaattgattatccgtgatgaatcagtccatgggacttacatcggctataagttccaattagccttcaatgaattggataagtcagaacaagaagaattacaaaactggatgtatgatttactgtacgacttatatgccaacgaagaaaaatacacccacgaagtttatgatggcactggttggacagaagaagtattaacttacctccgttataacgccaacaaagccttaatgaacctcggtcaaggcgccctcttcccagatagtgctgaagatgtgaaccccgtgatcttgaatgggatgtcgacttcaactgccaaccacgatttcttctcccaagttgggaatggttatcgcttagggaatgtggaagcgatggaagatagtgattacgactttgattaattaaatgcaatagcgcgccccactaatttaagtgagacgcgctatttttttggttattttttaaattgtttcagatatcgtccggccaataatttatgaaacttaacgcccaacgtcggatttgaggcatcaatatcggcatacatcgccgttgtaatcttgttgagtagtggcactaactggtcgagttctgcctcggtcaaggcgttcacaaacggtggcacctcttgattggcagtttcaatttcttggcgaccggcatccgttaagttaactaaattaacccggcgatcacttgggagcttacttaacgtcaccagctcgcgtttagcgagtttagcgacaaattcactggttgattgaggtgacattcccaaacgcgttgctagttcacgttgcgataagtgatcttcatcagcaagtgccaatagaatcttcccctggccttcgacgattaaatgcgggcgtgcttgtttaacgatatcatcgtagatcttactgagttgttcatattcagctaattttccggcgaccaattcggccttgacactctttgccatacgtcatcttcccttcgctgttttaattagtatacaccattccaaaatctaagagtagcaatccttgacattttaatcaggtgaccttactatataaattaatcatgtgacctgattattaaatgaggaggcaatattatgtgcagtgagcatgtcattgaagtaaacaatattcaaaaagcatttgggaccaaaaaagtggtgcgtttcgtttcgctagccgtttctaaaggtgagattttcgcattattagtgcccaatggtgccgggaaaacaacgctcttaaaaatgatgaccaccctcctacgaccagatagtggcacaatcacattaatggctttgatacgataacacaaagccgccaagtgcgccaacagtttagtgtcaccaatcaaacagcggcaatcgatcaagacttaagtgcgcgcgagaatctccgcttatttgggcggttaaatgggctcagtgccaaagcgagtcgaacccgagctaacgagttactgacggactttgatttggaccaatcagcggatcaaacattggcgactttttcaggtgggatgcggcgacggttggacttagcggtcagcttagttggcaagccaaggatcctctttctcgatgaacctaccactgatctggatccaagagcccagacgcaaatgtggcatgcgattcaaaaatgagtcgcagttgttaatctgattgttccgtgtttaggtaaactagtccctttttttagtctgtgttttgggtggtgtgtgtgtttcaatggaacgattgcaaccagtcataaaaaacattgtgatagatagtaataaaatgaagacaggcattatttttttcatagtgattgttttctccctgatcattgaatttgataaattggatagcgattgtagagtgggtcgtttagattggccgtcgcaacaatggcttgcagtgtgaagtcgcgcggaatgcctactgtgaccatcccatagccaaagtcttggtgtggtttaaactgattatcggcaataaaaatgaagccgtcttcgtccagtttttgataggaattgtgcgctagtgtttgcgtagttgtttgactcaaaaacgttttgagcttatttttcgtattcagttgttcattcggttgatgcgcaatgacgaaaaaggttttaccccgataattataacagttacgcctactttgactagtcttaaatattaagttttatcgaaaaacgataaaaattaattgtttttcaataaaaaacgattataataaaactattcttaaaaacgaggtatcagatgaatgttaaaaaaatggctacttagaatggcattactcggaattgcggcggtatttggtctgttaagtttgttagtgacgatccaaattgtgaccacgaaacacttagaatacccagcgacaatctggatgttggcgattgctgcgtatggtgtgacggcgagtatttggtttgcattaatcaagttggcgcagattctccgcttaattgagcaccatcaagtttttctccctcagacgctacgatatgtatcagcaattagaaaagcgattttggttgcgagtttgacggccctttttgccctcccctttttctaccggattacgcaactcgaagatgcaccaggcttgatgttgctggggttaggcctggtcttcattccgtttgcaatcctcattttgatgcagattgttgaagatctttttaaaagtgcaatcgcctttcaatctgaagtcgatttaacggtctaaggaggaattcaatggccattcgtgtgaatttagacgtaattctcgctcaacggaaaatgagtgtcacggcgcttgctgaacaggtcgatattacgattgcgaacctttcgaatttaaaaaccggtaaagccaaagcaattcgcttttcgacgctcgagaagttatgtcgcgtattagactgccaacctggtgatattttggaatatagcgatgattaatcctgcggcccccttttatcggggaccgcttttttaatgcttcagtacactggttgatgcgatatgtagtataataaatccgtagtgattatgaaaggggttttatgctgatgtattacgttgtgatgaagtcaaatgatattcgccgaaacttggcaaccgaacaatatttaatgaatcaaaaaaatttcgatgaaccactcttactattctacattgagaaaccatgcattatcgtgggccgcaaccaaaatacgtatgaagaaatcaatcaaaaatacgtggaagaccatgatattgcggtcacacgccggttgtctggtggcggtgggatttatcaagatctcggtaacctttgtttcagtttcgtggtgaacgcagattctgaacaattcggtgatttcaaatccttcacgcaaccaatcgtcgatgcactccatcaaatgggcgccacaacggctgaagtttctggtcgcaatgatatgttagtggacggtaaaaaattctcagggaacgcgatgtacaccaagaatggtaaaaccttctcccacggcaccctttcatgggatgttgatttagatgttttgacccaagccttgaatgtccctgcagataagattgcgtcaaaaggcattaaatcgattcgacaacgcgtcacaaacctaaaagggcacgttgaccctgaataccaaaacatgtcgacagaagagttcagagacgtcttattactgaacttgatgcacgccgatcaactagctgatattgccgaccgcgaatatcaattaacggccgcagacgaacaagccatcgataagatttttaacgatctctatagcaattgggactgggtctatggcaagtcacctaaatcaacggttcaaaaacgcaaacacttcgatttcgggacgattgatgcgcgcttgttaatcgaaaatgggaagattgccaacgtcaagttctacggcgacttctttggttccggtgatgctaatcaattggctgaaaaattagtcgggacggtttatgaccgtgaacatttagcaagcactctcgaaccaatcgacaccacgtcctacttcacagggattccaaaaacagaattagttgaattattagcacaataaaaaagagtgtgtgacggaacgcggtgatcccctgagggttaaccgcaaggatatgagttacagaacacgtttggactataaaagttcggctatcaaaaaggagctgagacaaaatttacttttgtctcagctcctttttgattttatgcgatgatttcagttgtgattgtttctgggttaaaagctgtttgaagcactgttttaaccgtttgttcaattaccactaattgagctgatgattgtccgaaagcataaacaacgagcatcgcttctgtcgtttcaggggcaatcattgcgcgtgtggaatccgaaattggactgccaaacgccccctgttgatcgactaaaattgggaagtgactgatgttgatcgcccctttaccaattccggcgtactcgtccccttctgcagcgacttgataactgattgggccgtcgattttagctaagtcgtaactgccaatcggtaattgtaacttcagggatagatagttattcacatcaaccagtgcattaatttgatagagcccctgtcctttaacaacgcgccgtaataagctatccgaagatggtcggtgccgtgttgcatcaagtccgattgccttatacgtttttttcgtcgcgatgatgttgggcaactcacgaatttgttcgagcgataaattcgcttcgatttcgttgagcaacggcgttaaagttgtgtcccagaacgcggcatcttttttagcatttgtgaatgagaatgttgcggtgaccaattgtgcttggtctaagtttgcttgtttagtgattgtcatgtgtgaatcctccaatttgtgtttaatgcacgaaattagcggattgttggcacatcacattcaaataatggggataagagcatgagacaacctcctagggaaatagaatagttattagtataacaattaaggctgaaattgcaaccacgtaaaaagtctcgcacaaaggcgagacaattgactagcgcgctatttttctcaatctaaacgtgattcgtctagtttgcatgaagtgttggcaaatgccagcgatgataagcggtgcaacaatactggtcaaggtgctaatccagaaagttggctgatcgaaggcaattttaatcgccgatacgacattcacttgttcgaaattaacgaagaaataatcggtccaatccggaatcatccgcgtaatgattggtgtgatataacgttcataaatcgtggagataattaaccatgctgcaaataggaaaacccaagctttatgttcaaataaagtaatgaaactactgatcgctaaaccctgggccatgaacgtccatacgacgagaattaatgccacgataatgtgggggtctaacaggttagctttaatacccgcgaatatttggttatgaatcgcgattggatataaacaagcaaaggtgaccagttgactgctgaataaactgattaattgtgttaggaagctaatctttctcggaatcccattcaaaatggcaaaattaaaagtttttcgagtggttgtaaaagattgaacgactaatgtgatttgactcaggaataagaaacctgtcacaattgcaaggccaaaatcacctaagtctaaattctttgagaaaattaaagcaacgacaaccatcccgccgaaaaatccgatggcaccccccgccagtgttttccaaatggcggtcaggcggtaccgcatcattgcattaaacatgtgcttcacttcctttgttcgttaatttaatgaaagtttcttgtagatcgatatggtcaatcgttagacgatctggaataacccgttcttctggtaagacgtcataaagataaaccgtgtataaggtccccatttgctgggaatctaagacgtttaagtcggtacagtactcgcgaacaagttcttccgggccactgacacggtaactcttggcgaggacggtttccaaatcatcatcgacaattaattgagcgtcgttcaagaccaagacgtgttcgactaaggtcgcaatttcttcgatgatatgggtcgcaacgacaaatgtccgtggccgactttcataggcctgtaaaatgtagcggtataagaggctgcggtagttagcatctaagcctaagactggttcatcgaggaaaacatattccgccggcacacaaagcgcaacaattgttttaaaaatcgtgcggtacccagttgaaagctgattgagtttcttttttggattcaaatcaaatgcagtcagcatttctttggcgagtgcatgatcaaatgaaccttgcagtaaggcggtatttttaataatggtccgcaatttgtcatctttattaaagagattgatttccgacatcaagtaaattgtttgtaacggatgatcgcgaccggttaagaccgtatcgccccatttaatctcacctagggatgcagtttgatgattggctagaatacttaataaggtactcttacccaccccattgcggccgagtaagccgtaaattgtattgggtttaagtgttaagttgatgtcgtcgaggacgacctgtttcccaaattgtttaatcagttgtgtggtttgtaaattaggcatggtcataacccctttcaatcagtgcaattaggtcgtctttggttaggtttaattgttgtgcttcagtgataaattgggcaacatagtgttcaaaaaattcagattgccgtttttcagtgatctgtgcgggtgcgcttgatgtgacgaacatgccgagtccccttttcttttcgattaagccgctggtaacgagttgattcatccctttgagtaccgtggctggattgatattgaattgtctggaaatttcagttgtcgatgggacttgactaccaggtggaaagaccccagtaaaaataccctcttcaatttgttcggcaatctgccggtagagtggtgcatcattattaaattcaaaaagcatccggaacacctccgtttcgttaattggttagttacttatgtagttaactataatacgtaggctgcgaaatgtaaaccgctcctcaaaaacatttgattattcgttcatattcacctattatgtacttataatcaaatgttttcagagaggatgagaacgatgcagacagcctattgtttcattgatttagcggatagccgcacccgttttacggaacaagcacagacactccagttattgcaacacttcgccgacacgttgaatcaccattttccagcgttattaacaccatttgcaattaaggatggtgatggtctattgggcggtttttcagcggatgaccaggcacagattgttgatgtctatcccttttgtaatgcctatttaaagagtgacgcttttcaaactttctggcagacacattttgcggggctggcggagcccactttttattttggggttggcttaggaacgatgactacgccgagtccaagtgactatcaggatatcaatcgggtcaacgggacagcaattgtgaacgccctcgccgcagcagatcaagccaaactgttgcgtcaaggtgctgaattagcacaaggttatccctttatgacgacggcctttcaatttcaattagtggcagatcaaccagccgcaaatgggattaatgccctcttttatttaatttatgagcaactcttgaatacgcagttgcgcaaggacgcttttgctgaaatcgtgcttcaaccaacattgaaacgctatgaattagcggaattgttgtggaccaaatacggcgttgcttcctatgaactagactacagtgatcaaaaagggcgtgcattagcctctagtaaagtcagtcgcttactgaatcagattcagtatcccttgattgaacagaccctggcaacgttgcgcgcgcaactgatgacctttaaggaggcaatcgaatgaacctctttgcgcttttcttgcttagtcatattggctgcgactttgtctttcaatctgatcagatggcccaatgcaaacgttcaacgaaactcggtgtgaaatggtggccattatgcaagcacgcactgacacaagtcccgttagtgcttattttatggggtggcggttggttaatggcaccacctacttggccacattggcaaccgttactaatcggattagtcatcattgtgatgagtcattggctcattgatctatttaagcaaaatagccaaccacttttaaaagcacagctacatttaaccagcaatcgcgtaccagtgatgagttataccatcgatcaagcactccatttaatagtgatcggccttgtgagcatgttcctcggccagcaatgggcgtttaaccatgtgaaccgattattattggcggccagtattgttttgagcacgttattatttgccgattatttcattagcttctatttaaaaggactggatttaaacatggatcgcctgccagatggtgcaaaactgggtcggcatattggtcatttagaacggtttgccatcttaatcttgttttacacgcacaatgttgcgagtattgctgtgattgtggcgattaaggcgctgacccgctttaaagccattgaatccaacgaacaccacttcgccgaatattatctcattgggagtttgctcagtctgatcttcggctgtcttggcggttatctattaagtcttattgcccattaaaaaaatgccgcagaatcaggaaaaatcctgttctgcggcactttttatattattcagcgatgattaataatgatttaatcgctttgcgttgatccattgcttcataagcggcttgaatatcatctaaggtaaagcgttgtgtaaagactttaccaggattaatggcaccctttaaaacagcatccaataaacgagcgcgatcatgagtcgttacggcagcaattcccccacgcaaaccgatgttcttccggaataaggcattggtgttcatctctgctttttggggaatgccgacacgaccaatgacagcccctgcgccagcaacggcgacggcagtggtgacggattgttcggtcccgacacattctaagacggcgttggccccagcgttatcggttaacgccatcacttttgcgaccccttcgtcaccgcgttcagcaacaatgtctgttgcgccgaattcaagggctaatttttgccggtccgcatgacgactcatcgcgataatccgtttcgcaccgagtaatttggcgccaatcacaccacataaaccaacggcgccatcacctatgacaacgactgtgtcaccgggtttcacttcagcggacacggcagcgtgatagccggttgccatgacgtctgaaagcgtcaatagattattcagcatttcatcagagtaatcgcttggttggccaggaactttaacgaggccccagtttgcattgtgataacggagatattcggcttggtagccaccaggattattctcgcggttggtacaatcgccatcaaaaccgtttaaacaagcggcacagtggccacaaccatgggtaaatggcacgatcacaaaatcaccgacactaacattttgtacgtcagtcccaacagcatcaacgatgccaattgcttcgtgaccggtgaaaccgcctacttctcgttttgaaatcccacgataccaccataaatcagaaccacagacgcacgcgcggataatgcgcacgaccgcatcggttggcttttcaatcgttggttttggtgcttcggtaatggtcatttgaccaggacccataaaagtagctgttttcataactataatctcctatctcttcctattatattgtctttactatacaccttagacctcactttaatgcaagctttttttaaagtccaatcgccagttgttgtttcttgcttaacacttcatcttgggtaatcccaatataatggagcgtcgtttcttgcgttgaatgaccaaaatcaatcatcaatgaccgcacgtccccgaattgtttgtagaaccagtagccgtaagttttgcgcatcgtatgggtaccaatatcattacgcccaagtttcttacctgcttcagtcaacatgcggtaaacaccgttgacggtgatgtggttatcgccgacgcggctaggaaacaaccaatcattgcctagcaattcattattttgaatatagggactgatgtatgggcgtaaactcgccaaactaatttggcgccacttacccgttttttgttcaacaatcacgggattgtcttcgatcacatctctgacttttaactgcacaatatcagaacagcgtaagccagtattaatgccgagtaaaaataataaataattgcgactacccatttgtgaatggcgcaagatgactttcatgtcttcaatctcatcttttgtccgtaaaggttgaacatttaattttttgccttttttagtgcgcgatttccgcatgttttttccgcctttttgaccgcattctttttctctatatcattataaaccatgcggtggtattttgcacctttgattatcgttgatttaaagggattccgagcgcattctttctaccaaaagaatgcgctcaaacacattaaaggctattgatggctaaatcacggtctaatcacgtttataaacgatcaatcaccagaggcgcattttaaggacgtttcagattagtgagtggacaagtggtcgcgaaacttgcttaaaatgcgaattcaaaaaggccccttaaagtcacaaaaaaaacagcgttaagacaaaaagtcctaacgctgtttttttaatagccggctgacaagtctaccggattgacgggtaattcacctttgtctaaataactgggtaaattttgatcgaaaattttgaagagccgttcatggatatcagcgatgtaacctgaaatatgtggcgtgataatcaggtttggtgtggcccataatggtgaatcacttggtaatggttcgttttgggcaacatcgattgctgctcctgccaaatgaccggattgtagatagtgcatcaaagctgcttcgtcgactgaagcgccgcgccctaaattgaagaagtaagcccctcgatggagttgcgtaaaaaaggtggtgtcgaagaaccgattggtgaccagtgttaatggcatcacattaatcacgaagtctgcttgtggcaatgcttgttcgtaatccgtgtcggttagaatctgatcaaaattggcaacgggtttcccgtgccgattaacgccgattgtgtgcatccccatgacgtgggcatactttgcaatttcctcaccaatttgacctgttccaaaaatgaggagtgtgcggtgttccaaatttgtcatttgttcaccaatagcatgatgctcccattgatgcgctgcttgtgcgggtaagctctgataaatcccacgggtaaagtgtaatatgtaacttaatgccgtctgtgcgattggttttgcgtgcatcccgcgtgcgtttgataccagtaccccttgcttagctaacgtggctagtggtaaataatcaacccctgagcttgcggtctgaatccattttaattgattaccgggctctgctaaaattttcgggcctacatctttattccaaccaaacataatctcaatactacccagttgacttggttttaaatcagctaaagcgatgattgttaaatcttttgcagttagtgctttgacgtgttgttcaggaattgtttctgctgctaaaatgactgtcaagtcgatccctcaccttattattgaagtaatctttattataagggattttcagcaaataaaaaagcattaccgactgaaaacggcaatgctttataaaaaattttattctttttctgcacgtggccatactggacgaccccagtattggaataaatcagtttgaatccgaccattatacaatttccggcgtttagttgcgcgttgcccgaatgattcttggaattgtaagtcacttgttaaaatatacttactccaagtcttcaatgaccgataggtatcacccatttctttatacaaagcacgggcttgtgtttggtcgcttaatcgtttcccgtaaggagggttggcgatgatgaccccgttggttaaatctgtcttgaaatctttaacagcgagttgtttgaactggatatcatgtaaaacaccagcttcgtttgcattcaacttagcgatatcaatcatgttttgatcgatatcataaccaaaaatttcaagtggttggtctttttcggctgctttcgcttcggctttggcattttctaaaacagaagcatcgatccaatcgaagtcttcaaaggcaaacttacgatgcataccaggtgcaatgttgtgaccaattaaagctgcttcgatcgcaatggtcccagaaccagtcgttggatcaacaaatggcatatcaggttgccaacggcttaaaagaattaaggatgccgcgaagttttccttcaatggggcttcccctttttcaaggcggtagccccgcttgaataaactaggaccagttgtatctaagctgatcgtcacgacatcttttaggatgctgacttcaagcggatacgttgcgcctgtttcagctaaacgtgttcggcggtgatagacagtacttaacttatcaacaatcgcttttttagtgatggcttgcacgtctggttcgctatggagcgttgaacggactgagcgaccagcaactggaaaagcggcgtctaatggcaggaacttgtcccatggcaaagctttcacttgttcaaaaaggtcatcgaaggttttggcctcaaattgaccaatcgcgattttcacccgatcagcactgcgtaaccagagattggtttttgcaatatctgccacatcgccttcgaaatacactcggccattatctgaacgtgtttcataaccgagattttgtaattctttggccgtaatggattcaatcccactcgccattgttgcgtatagttggtaagtcatgtttttaaagatccccttaggaaattattttttaaataaaaagagcttgggcaaaagcccaagccacctgattgtaaacctttataggccatgttttgttccagaacttccccaggaagaaagttccttcagtaatcatctatctgttcttacgaactctcatttttagttcatttccataaatgagacgcccctaccaaagtttgggttactcgctcgcggggtttacctcgttccaccgtccaagtttccaaggacgctccgtcactgtggcactatttaaggatattcacgcatgaccgaagttttagcgctttttccgccgttaccgttaaggtaccctggcttattgggccaggcacgaacactacaagcatctcagcctgtgcgggcatggaccttcctcagcctaccgatgtagaccgcgattactcaagatttacaaatgttgaatcaacgtttataagtatagcacatgattaaagatttgtctcgtcaaattgtgaatgattttgaactcttgtctgtggcgcttgattttgttcacttaacttagcaccgaacacgtggcgttcaaggtttgataagcgtttcaaaatatcatagttggttgctactgaagattgttgtggtgcactttccttcacgttatcagaagcgctgagttggcggtttaattcgtcaaccttcttgaataagcgggcattttccgccgttagccgatcgattgcttcttgataagtttgatagtctttaataactaaatcaaggtaaccatcgacttcttcaggttcatagccccgcatttttgttttaaattcttttttcaatatatcagttgggttcaattcgatttcaatttgattgtccattttgacacctcatttagaataaatgtactatgattcccattatagcaaagttatcggataattaaaactcttgctgatctaattccgctaactcagtcgcgatatcttgtagttcgaaaaaatcgaccaagttaatcggataatcttgttggtcttgatattggcgggctgcatgataatcatattctggtttgcccggtgattcacgatcatagtataatagttgaccatccgtatgggtcagcatgaattgttgatactggcgcaattgttgcggtccagaatacggtgcgttaatcactggttcgcaaaaatcgactcgcgctttgagctgactcaattgagcttggttattttcgttccattgttgaccaaaatcattaaacggcaacatcatcgccaattttaaatccggatagtccgtttttagttcaatagcaacttgcagactccactgttcaatccccatttggccaccagtgatcacccactcgagcccatcatctaaatattgtgttaactgcttttttaaggaatatttaattactttaagtttctcgtcagtttcgccaaaaacaccgagttcatagcttcgatagccgctcacccatagtcgtttcaagtcaggtccctcccaaatgattttcaattaaactaaacattgctataatagtgaaacaggagtgtgattttcaatggcctttcattatcctaacggacagccttatacaaataatgagacaaaaccaactaaaaagcaagcccggcaaccagaagcaacaacgttatttggtaaacgcggcatgacgttggaagaagaactcaatgatagtaatcagtattatcgattacatgcaacggctgtcgtgtataagaaaccaacgccaattcagattgtgaaggtcgactaccctgcccgcagccaagcggttattaaagaagcttattttaaacaagcctcaacaactgactataatgggatttatcagggccgttacgtcgattttgaagcgaaggaaacgaagaataaaaccgcgtttccgtttcggaacttccatcaacatcagattgaacatttcagagcctgcttgaatcaaggtggcatctgctttgtcattatgaaatttgtcccgctacaacggctattcttgtatcccgcaacagaactgattagccgctgggacgcgcaagttgatggtgcacgaaaatcgatttcactcagtgatgtgattgacaatgggattgagattaagtaccaacttaatccaattattccctacttagatgccgtagatcagttattaaagcggtcaaataaaggagtttaaagaacaatgtccgataatcgaaacaataataattcgcgagttgcaaggcacaaagctgaagcaaaacccgctaataagaaacgccggcccctctttttaagaattctaaaatggctgttactactgattgtagtggctttcgtggctgggattggtttgtttgcctactatgttaaagatacaccaaacctaacgcaagcggacctgcaaagtccgaatgcgacaattctatacgatgatcaagggaaacctttcaaaacaattggtggcgaaaatcggagttatgtcaagagtgatcaaatcccgcaaacattaaaagatgcagtagtctctattgaagatcgtcgtttctataaagaaaaattcgggattgatccaatccgaattgcgtctgctgcagtcgccaatattactggtaaatcaccgctgggcttacaaggtgggagtactttaacccaacaattgattaaactgtctaaattctcaacgaaaaacagcgatcagactttcagacgaaaagcacaagaagcgtggcttgccgttcaagtcgaacgtcaatattcaaaagaccaaatcttagagtattatatgaacaaagtgtacctgaataacggggtcaatggtatggggacggctgctaagtattattatggcaagtcgttgaaggaattaagtttgccacaactggcattgattgcgggtatgccgcaatcgccaagtaattacgatccgtacctccaccctgatttagcgaagaagcgccgtgatttagttcttgatgcgcttttgcggaacaataagattacagcaactgaagctgccgaagctaaacaagtcccaattaataccggcttagtggatcaacaaacagtagcgaatagttcaacggattctaaagcaaccgacgcttacgtcaaggaagtcctcgccgacttgaagaaaaaaggctatgatccgtacacggctggtttgaaagtctacaccaatatcaatatggacgcgcaacgtaagttatacgatatcgtcaataatgatagcagtattccattcccagatgatcagctacaaacagcagtttcaattacagatcctaataacggtcgaattgttgcgatgattggtggtcgtaaaactggtgatgtgcagctcggttataaccgggccgtgcaatctggccgaagtaatgggtcatcaatgaaaccattaatggattacggtccagctatcgaatatcttgactactcaaccgcacagaaactacaagatgtcccttacacttatcctggaaccaatattcaattgcataactttgatggccgttatctcggtacaattaccgcgcgtaatgcgcttgccaactcacgaaacgtcccagccatcgaactgttagaagctgttggcatgactaaagcccgtgaattcgtgaaaggcttaggcattaacgtgccagctgatactggtctttcttatgggattggtgggaatgtttcaactgttgatgaagctgccgcatatggcgccttcgcaaacggtggaacttactatgcaccaacttatatccataaagtcgaaacagccgatgggattacgcataattatgattctgatggcacacaggctatgaagagttcaacggcctacatgattactgatatgttaaaagatgttattaaaaatggttctgggacgttagcccaaattccagggcttcatcaagctggtaagactgggacaaccgattattctagcgaagaaattgccaaatctgggttaaacccaactttagcgaaggatagctggtttgccggttataccaagaactattcagtgacggtttggactggatacgatgaaccacttaaaaatggattaacaatgggtgagcggaacgtcgccgcttatatctataaagcaatgatggcctacctcgctcaaaacgcaaccaactcagattggtcaatgccaagtaacgtggttgctaaaaacgtggctggcgtacgagaactctatattaaagggacgacgaccattccaagttcttcaagcagtcgatcttcttcaagtagtgtactctactctagctcagaagcaccggtcagctcaagcagtgaaatttctagctcaagtagcgtggttgaaacaccaagtgaatcttccagtgtgccggagacctcatcttcaagcaccccaactgaaagttcacaatcgcaaccttcgacctcaacccctccggcaacaactaatccaggaacggggtcgacgacacaaacaccagcagcgccaactaactaaaagaagcaccgttcagttcaacgataaacgttggctgaacggtgctttttttgcgttttttaaccacgatcttcaagaaattgttggcctgcttggcaaatccttaataagggacactcatcgcaatgcggcttacgtgccgtacagactcgccgcccaaaaagaatgagtgtgtggtgcgcttgaacccatgttttcttaggaagcttcgcttgaaagtccttttcaatctggatcaccgaggcatcctgtgcactgattttgagccgtttggcaatccgagtgacatgcgtatcgacggcaaatgatgggacgttaaaggcgtcacctaaaacgacattcgcggtcttacggccaacaccagcaagttgttccaattcggcatgtgtgcgcggcacttccccaccaaaatctgccattagttgctggcagcatgttttaatgtgtttagctttattatgatataacccgattgaatgaatatcagcttcaatatcggcaatctctgcattcgcgaaactagctggtgtcgggaaatcagcaaatagttgtggggtgaccttattgacggaaacgtcggtggcttgtgcgctaagcatcaccgcaatcaacaattgaaacggtgaatcagcaactaatgcgccctgcgcatctggaattaatttgtatagttggtgcatggcccactgtgttttggcttttgataacatccgcttcatctcctattcgattaacgtcttggatgggccttttggtaagcttgtagggattctttatcagtaatattttgtttctgccagttgagcaaaatcttatcaacatacttcaaggaatagacttgatttaaaacggcttctcgcacggctaattgaatcaattctggttgataatgatctaaatctaaccagttggcaacaatctcagattccaatggcgataatgggcggccaagagcttgttcaacttggttaaagaccgcactccgttggttaccgtctagtgcttgttgagtgacttgtgcgtcttgaacggctagcacgctcaatttagttaaggctggtgtgagatcgtaatggtcttcagcctgaccttgttcattgacagatgatttaagggtaattagttttttctgtaaaagttgatgaatcaatgcgtaaatttggctggattcaattcccatgcgttcaccaatcacagctaaatcgggaaagtcattgttttgactggcaaaatcactgagctgtaagtaaaccactaattcttcagaagacatcttgagcgtttgatagtgatgcagtaacagtcgagagacactcaattggccgccttgtaaaaacgcggtaagttcgttcatattctagccttcttttctaaaagtttcattagttctattgtaaccaattttagacaaataaaaaagcgccgagaacctgatttcggttcacggcgctttagttaatcctcaaagccaactcgtttgagtcagcactctgatttgaaacatgcttttgaaagtagtcctcggtgctttgctacgtccagcaaacgatcgacttgcgtcgctcattcactagactagacaaatgctcgagaactaaccactttcaacgcactctaattcaaacgtgcttttgtagctaggttcctgcgcttaacaatgattgtcaaataatcgattgcatcgattattcgccaaccaacgttaatgctcagaacctaaccagctacaacgcactctatttgaaacgtgcttcttcgaactgccttttccggttaactgtaaaacgggcaccatggatgtgaagcgccataatgcccgttttgctgttaatcctcaaagtcaactcgttcgagtcagtactctttatggtttgattctgttaatcattcttgggaatggaattgtttcacgtaaatgatcgataccacagatccatgtaatggcccgttctagacctaatccgaaaccagaatgtggcactgatccgtaacgacgtaagtctaagtaccattgatattcttcaaggtctaagcccattgctttaatttcagcttctaatttatcaaagtcagtttcacgttcactaccaccgataatttcaccataaccttctggtgccaataaatcagcacataagtaaacatcatcacgtgttggatgtggcttcatatagaaaggtttgatggcttttggataattcaaaatgaagactggttgttcaaattgatccgataaataagtttcatctggtgcgccaaaatcatcgccccatttaatatcgaagtcagctgcttgtaacatttcaacagccttatcgtatgaaatacgtggatacggtgttttagtatatttcttcaattggtcaacatcacggtccaataattttaattcataggcacagtgatcaatgacgttttgaacaaggtaagccacgtatttttcttggacttcaagactttcatcttgagttgtgaaggccatttctggttcaatcatccagaactcagtcaaatgacgacgagttttggatttttcagcacggaaaacagggccaaaagtgaagactttaccaaaggccattgcgccagcttcagcgtataactgaccactttgtgttaaataagcatcgttgtcgaaatattcgatgtggaataattcagttgtcccttcaggggcactacccgtcaagattggtggatccatcttgatgaagccttcttggttaaagaattcataagaagcgcggatgatttcatttctgattttcatgatcgcaaatgggcgttttgaacgtaaccataagtgacggtgatctaataagaattcaatcccatgttctttaggtgtaattgggtattcgctgctgtcaccaattaattcgatgtcagaaatttcaatttcataaccaaagtgtgaacgagtatcttcatgaatgacccctgtcacccacatacttgattcttgtttgacatcttttgccaattggaaaacggcttcgcttacttggcttttaacgacaaccccttggaaaaaggcagtgccatcacgtaattggaggaatgaaatcttcccacttgagcgtttgtcggttaaccaaacgccaattttaacttcttcatcgacatggttttttgcatcgataatactgatttttttaaccataaactctgtctccttatgtgcaacatttaatttacaacagttcaaaataactgatagttattattatataacaaaaccctgacaaccacagccccctaattgagaaccctagatattttcaatcaattgaatcgtcttcccggttttaaaatcgagggttaaataacaaagacggcctttgtcacttttatagacaacttcccaaacaggcttgttgcggtacataccgaagttaatgttcagtactttttgcggatttttagttgaccatgtcttttctaacgcatcgtttttagaaataccaccactttgacgatagacagtggcatgattgcctttttcgttgattaaaacgaagatgccgtgattatcacggtctttaccactaacggtataatatgttgcatttcgatgatacgtgtagaacccatcaggctcttttaatttcgcgtattttttagcaatgttaacggctttggtttcagccgttgcttcgggttttcgagcttgatgataaatcatcagcatgctgccaatgattaccaacaataagaatatccagagccatctcttatatttgcgcacgctgcattctctccttgttcgcttgaataagccttattatagcaaaaaataacggctatcggcgcttaaaaccgaatcttagtgggaatttaaccaaaacaagtcggttaatttccggattattttaaccgacgctgctttttggggcaaacttgtcggtaacgcgcggcgcatttgttgcccatattgggtcgataataaccggggatctaaacaaatgaagacgccgcgatcgttaggggttctgattaagcgcccaaatgcttggcgtagtttaatcgttgctttgggtaaagcctctgctttaaatggattaattccttgggcagaaagttgagcgtaacgaattcgtgtctgcagtgcattcggcgcatcaaatggtaattgaacaagcaccactaattccagtgctgattccggaaaatcaacaccagcaatgaaactgcttgtcgccaacaagattgaatcgtgccccagcataaagcgcttggtaattttctccgcactacccgtaatcccttgggcaagaatctcacgatcaagcgataaaccggcgcggccaagcgcataatacacttgttctaacgcctgattagaattaaagaggactaacgcctgatgcggattgccaactaataacgttaatagctgttcagcaactgcatgatggtactcattgggggctaaattcttttgactaggaccatcttcagcgataaaaaagcgcgcctgttgcttgaagcggaatggactgcgtaatttcttagtcgctagtggttgcgcttcggtaaaaccaagttcacgtttcaaataatcgaagtgcccattaaccgcaagggttgcgccagtcaaggtgactggttcaaagtgcgcgaggatctgttgcatttgcggaccagctgaaagcaattgccactggagcttaaactgtggtaactgactaggttgtttaggctgtgtcatctgaatcattaacgcgtgttgttcctgcggtttcgtcgcaatgaataattgctcaaaccgttgataggcttcaacatccgccaacaataggttgatttcgttttcaaatgactgccaaatccccaaatccccctctgtatattgttctaaccgctgttcaagccagtaacgcaacgcgagaaaatgatcttgaatggtcaacagttggcggttcagttggtcgaattgattatgacaagcggtgacaaattgaaccacttcatctggattcaaataacgttcactaaacgcttgatgcgcttctggttgcggtagttcaaacgctgtggttaggtatgtctctaagtcactgatggttcggcctaacttggttaagtttttatgcactaaccgtaacgagcgggcttgcggtgattttttcgggaaaagccgggctaaattattattggcctgttccggatccgtatattgcaaccctttttgagaccaaagttgccaacgtgaaagtgaccaatcttgttgcgcaattttttgaacattgaaaatcatattttgtgcttcatctaagaccaagtatggtcgcgcaccccaggtttggtgatcattcgcgtgctctgccaggtaggcgtggttggtgacgagtaattcggcttgttgctggcgcttatgcaggcggcgtaagaaatcatcttgataaaacggcgcttgtggttgcagacttgttagtccccggtgttgcacgttattgaaaaatggtgtttggtaactcgttaaattgagttcatccaaatcccccgttgttgtttgggttagccaaactaagattttcatctgaagcaaccgcaccatccgattcttatgtggtaaacggagcgataattcaaagcgatgcaaatccaaatagtgacgcggactcttaacgatttcggcattaatttggcgacctactaatttttcaagaagcggtctggcctgcgttaaaatctgatcctgtagcagcgttgtcgatgttgcaaccactaatttgtgttcaggcgtcatacgataactataggggagtaaatacccgatggtcttccctaacccggtggctgcttcaattaatagtggttcaggtgcctcagattcgaaattatcgtgaatcatatccatcatggcagcttgcgctttacgccatttcaagtggggttttaataatcgttttttatcagcttcttccactggataatcagccgcaaaattagatcccggatagattttaaatgattcctcggctggttttcgtagggcaatgttttcacgaattaagagatcgttcggcagcggtctcgattgcgcatgcatctgctcggcaatcgctgtgaagaaatcccctgtttgacgtaacaagcccgcgcctaacgcactaagacgttctagggtaactaatggcagggtcttcagccgtgccattaattttaagaataatttagccgttaccaaggcatcgctgtcagcttgatgaggattgtcatgttcgatggcgagtaactgtgtgaggtcttgtaatcgatagctcggtgcttccggcaatacgatctgagccagttcaacagtatcgatgcccggcaaatcaagtggcggttgccccacgcgttctaattcgccatttaaaaaaggtaagtcaaagttaatattatgggccacgaaaacagtaccggataagagttcaactaacgttggcgctaaatcttcgaaaatcggtgctaattcgagttgatcagcagtgatatgcgtcaaatgttgaattttagtcggtacgtcgcgaagcggattaacatcttgcgaaatcgtctgaatgattttgccgttttgaatgagggcgcatccgaattgaataatgcggtccccttctttaatgtttgtgccagtcgtttctaaatcaacgacggcataaattgtctcttggttcatgctgtcaccaatactttactcattattatatcaatcatactatgaatgacgcgtagaaaccagtctagttaatagcgactagttggccaatcgacaatagatagagatatttagcggttaccggccggttagcaatttgcgtcaacgcggcactgtataggttaatttggccggtataccgcgctttaatcgcctcaatggcagcttctggatcagctaggttcacaaaatcagtcttatagtcgaacaaaatacagtcggtatccgtggttacataaccatccataatcccatggattaagacattgtcttgatcttctgggcgtaaaccggcgaataaggatgcagccggtaacaatagtgaaaatgggacttcccgatgaacttgcgctggttcagctaacagttgctgacccaactcgctctcgaagaatgtcatgatagcagcaactttaatttgttgtgcaacattggcagtgaggcttttttgtaaaacaagtcggtcgatgacactttgcacccgatcgatcgttactggttgggttaaatcgatttcttgtaagaccagatgcgtcgccgttccaatttcagccggactcgcttttcgaacagtctgcatgaattgtggttgaggtagttcatcggtcacgtaacgatgggtttgttgcggtgtatcagcgtcaaagcgtaattgccccaactgatcattgtcgggatcttcaaagagccgtttcacttctgaaacagactggtaagctgtcgtttcggtggcgccttttgctggataactgaatgttagctggtcttgaatcccgttggctaaatcagttgttaaatcgaccgccttgagtgccacttgttgttgctggctccaatcttgatcatggtgtaaagcacctggtaattcgccaaggcgcgtttcacttgtaaacgttaaattaaattcagttgcgtcatcgctcagaggtaggaatggtgtcccctcttcggtccaatcacgggcttgcggatgacgaattaagctcaatccaatccaatctagtaagttcgtgctagcttgacgaacagaagcgtccaaccgcagatcaggattttgctgtcctttttgccaagttgcaaatagtttcgcttggttatcacaactgcccgcgataatcagccgttgctcggcacgcgttaaagcaacatagagttttcgcatttcttcagcgcgtaacttttgccgtttttgggtcgtgatggttaattctggtagtgttggaatctttaaccgttttttcgcgtctaagtaaacaattccgagtcccgattgatcatcgagcacgtaattttggcgcaagtcttgctcgttaaattgatgattggcatccattagaaagaccaccgggaattctaagcctttactcccatgaatcgtcatcacagagatggcatcttgattggcgagactggttggttgggctaaatccttatcttgtttttgcaaacgttcgataaattggatgaactggaagagccctttaaagccgtttgcttcgtaagtcgcagcgcgttcatagagtgcgtgcaagtttgcttggcgttggcgacctgctggcatcccaccggcgtaatctaaaaagccggtcttttggtaaattgtccagattaaatcaacgagtggccgttgacgtgcaatggctcgtaactcatttaataaggtttggaaatgcgttaatttttcgaagacttgttggccgagttggccggatttttgtgcttcgaactgatcaagataattaaaaacggcttggtaatagtcatccgttttatcattaatccggattaatgcgagttcattttcgttcataccgacaattggtgaccgaagcacgctaaccagtggaatatcttgattgggattatcaataattttcaagaaagatagcatgatttgaatttccgttgtttggaaataattctgcgcatcactaatgacaatcggtaagccgaaccgttggaaataatcaagaatgattaggttgttgttgcgcgttggcgtcaataagacaatatcttgatagcgaattggccggatttcttgcgtatcccgatcccagatggtttcttgattatcaatcattcgtttaattcgctgtgcaactgatgcaatctgaccttcagctttatcaagcttgcccgttgattcttcatcagtcggttttgtttcgtataaaagtaattcagttggctgagttggttgatcgtcaggataataagtcgcaccatattgcaattcagcgttgtgatcgtaatctagctgccctaattggcggtccatgatttgtttaaagactaagttgacgaaatcatcgatattacgccgtgaacggaagttttctgcgagaataatgcgttcactatcgttatctggcttggcgaattcgtcgtacttaccgaggaacaaactcggatcagctaatcgaaaggcatagatggattgtttaacatcccccaccatgaagacgttgcggggtgcttgactagcgatagtttgaatgattgtttcttgtaactggtttgtatcttgatattcatcaaccaggatttcactgaatttattttgatagaacgttcgtgctgcctctgattccggagtgtcaccggccaaaatatccaaacagaaatgttctaaatcgccaaaatctagtaaatagcggcgtttcttctcagcttggaaggcttgcttaaaatcgcgggtaaccgtcactaacttaccgactaactcaccagcgcgccgttgaatctgactggtttgtgcttcgtcaaagacaaaataggttgttaaaagatcgtttagtgcccctttgacattatcgagggcgtttttgatccggtccttgtcatattgttcatcgggttctaatttcttagttcgtttggcgggtcccaattgggcgtcggtcaattgtgtgcgccactgcgcccaacttaaagtggccgcgttggcttgaatggcagttagtgctgcttgtgccgttgcgatagttggcaagtataccgcaaatttctcgtttgtttgacttagttcgttggcgagtgccaagtcttttaaacaggttgccaaggtcgcttctaactttggcagaatcgttgttttgaaataagcactggttgttaggccagtctctggtacctcgtaaggggcggttagagattgtaaccattcatcgggcgttggattggcaccagagaagttaaacagttcgaaaacaatgttggttagcccatcatcgttgcgatcgttcgaaaaattttgcgctaaatcataaaataaggcgtcgtttgactggtaatgttcttcgcgaacgcgttgccaaacttgatcctctaataagagacgttccgcagtatcacttaataaccgaaacgtgggatctaacttaatcacgtagtagaaatgtttaatgacttgtaagcaaaacgcatgcaacgtgctgatttgtgcggtcgggactaggctgagttgctgccgtaagcgttgttgcaccgctttgtcggttgcctcgcttgctttttttcgcagtgccgtttgaatccgttggcgcatttcggatgcggcggcttcggtaaacgtcaccaccaatagtgaatccacatcagtgccattcaagattttttgaatcacgcgttcaactaaaacggttgtcttcccggagcccgccgaggcagaaacgaggatatcatgccccgcgtgatcaacggctgcttgttgggttggtgtaaatcggcgatcactcatgtcgttcttcctccgagttcataattttggctaagacggcttgattatcaagcgcacttaattggcgataattattttctggtaacatcgcatcgaattggaaaatcgatttatatggcgacattgtgagtgcattcgtgcggtcgggtcgcataatcggattcaaagcatttttgccagcaaaaatcgcttcccccgctgctttgattagttgatcgttatgggcaattaattgctgtaactcatcaagggtgaccagttgtttcgatttgaatgccccactctttggacgattgaagttaaacagtggtgaatagccactttctaaagctgtatccaagttttcgagtaaggtctcatcgtttaaaattaagccatcatacttaaattgatccagtaataattgatcgagttcgcctttttgtagttgagcgagtttttgtttgttcagttgcttcaatgacattgttgggttttgaaggtgcagataaaaggccccggctggttttaccttgctttgcgctggtaaaattgctgcttgatcttgcaagacagtttcaaggtatgtcaacatttgcaatgccaaaccatagtatgcatcgcggaagctaaagctgtgttgactggatttgtaatcaacaattcccaggtaggcttggtcgtttaatgtcagttgatcgatccggtcaattttcccccgcaccttaacccgacgttgattgggtaattcgaattctagaccagctaatccttgttgggcaccaacttggccgaataagacttcggttgccaacggttttaagttcgttcgttgactctgatcgcgcaatgtccggctgacgcgtttaattgtttgactcaattgttggcgaatgtagcccattcgcgctgatttattgaggatcttaaattctggttgttcatacgctttttgtaagatttcatccgtcaatgcatcgatttgttgattatcgagatcgagtaagactaagcgttgggcttgaatcatcttgataaattgatctaagacttggtggtagaaatcaccggtatttgcaggtgtcagttcaaaaattgggcgctcgttcagttttaagccgtattttaagaaataagcgtattgattttgatagaactcttctaatttcgagatcgacgtatggatttcattgccatataacccagtgacaatatcgcttgtcagtgcaacgggttggttatggtacgccagactttgaaggagttgattggttaagtagtgactaacaggaaattgttgtaataaacgataaacagtctgccattggtcaggaattagtgtttgcgtcgcttgtgcttgtcgcgcaacttgaatcaaatcgcttaacaaactacgccaagaacccgtaattggcgctgtacttgtcggaatgacttctgctagaacgcgttgctcggttaaatggaagtagtttttaatccggtcgacatagggggataccgtgtagttcgccccttccccattattcaatggataagtgaaatacaatccttcagtaccacttaaaaaggccaagtagttcagataaggttcaaagctcatctgactggcacttggatcagttaagaattgttctgaattgaaccgatcggttaatagttgccgatcatggtcggataataaggcgctggtttcaatctgatcaggcatcacttgatcggtcgcaccaatcataaaggtaattttgcggcgtttagtctgcaccatccctgattcagataaaacgacctggtcgagtgtcgatggaatttgcgcatattgcgccgtattaaacccggccgctagtaaatcccaaaagccctttagttcgaaaggttggtcgcctaataacgtcacatattcatccaacatcgtcataaatgtttgccatgtctgttccggttggccagctaaggcaatttgattggctgcgagtgcttggtcccgccaatttaacaattgtcgatcgacaccttgttcgattaagaattgatagagcactttagcggcatcgcgccctgttttggcactgtctaaccgtttataaaatggtggtaatacggattgaacataatgccgaatccgattgatccgttccgtgagcacttcatcttctgttgttcgaacaccatcttggaaggaaccgaaccgataatattgccaatcggctgcgcttaaccaatcatgcccttcatacccactttttaaaatcagattttcacacaaatcaagatcagcccggaattcagcgactgattgatagtcatctggtattaaaagctccgtcttcaaaagcgccattacatcttcatagcggtagtaatgctctttcacatcaaacaacgctgccaacatcgcaacaagtggatgggccgccattgtttccggtaaatcgcagaagtacggcacttcgtattctgtaaaaatcggcgcaatcattgtttcataaggggctaaatgccgagtcataatcaagaagtctcggtagcgatagtggccggtttggactaaacgacgaatttcacgggcaacataccgtaattcggtataccgattttcggcaccgatcacttgaagttgcgtcgaatcgatttccggtgctgttgggatctgaccgtggttttcagaagcaacccagtaccgatcaagcgcgagtaacgttggtgaaacccgctggttagtggcaatctgatcagtcatgatgggaatgtgattttgcttggcctgttggtataattgataatacgtacgctcagcttgataaaagaagctgagtttttccggtggttgttggtaattaacatagtcggtaattaaggctacggttaagcttgcttgctgcattaagacggcgactagcgcttgttcttgagccgtgaattgtgcgaaaccttcgatatagaaatgacaatcgtgtaagtcttgtttttttaaataatcagttaaggcatcaattaacgtcgtattttcgatgaattgcttttgcatagcggcttcaaacgccgtggcaataatggttatttcccgcaatttagtagtcagttcgacttcttcgggcgctagctgggccgcaatctcagttagctcatcgggtgtaatacagcccactttaagttccaatagttggctcgttaattgagcaacaaagcctgtttgattgacttccccaccaaataagctgagttcttctgcatgttcttgcaagaggcggtagacaaggatgtttaacccggcggttgaaatccgcggaatctggtagtacggggtatttttcatgaaataccaagctaatcgacttaatgagaagacttggacgcgtgaggttgcgacatactcacttccaggggtttttaggtcatttaaaagtgcgacttcagattcaaatttgatatgattcgggaccaaataaaaaaagcggtccgtgttggtggccttaaggtctgtttgtagttgcttgactagtgtttgatggtggtcataactagctgtaccaataataaattttaagctcatggcgcccacactcctttggcgtcattttaccatagatagacaagtgattgggataaaatccggctagtccgttggtaaaaagcgggtataataggaaacccattaacctgtgcccaatttgatttatgtggcggtcatttttgttttgcagtatagtagtaagggtatcttcaagtcagaaaaagagattaagggtgattgtatgcagactggtgttggccaaagtcatgcgaaaattattttaattggggaacacgctgtcgtttatggacaacctgcgattgccctccccatctttgcggttcaagcgcgggtaacggtaactctcgagccggcactccagacaccgcaaattaagagtacttattacaatggtcctctagaacaggctgttggtcagatgcaaggcattcgccggttaattgaacaactgtggcatgcattagatccgaacttaaccccgtttgaattgacgattgaaagtgacttaccgcccgaacgcgggatgggttcttcagccgcaacggccgtcgccatcattcgagcgttatttgcgacttatcatcaagagctcagtcaacaacggctgctaaagctagccgcgctctccgaaaatttaatccacggtaatccaagcgggattgacgccgcgacaaccggcgcaactacaccattatggtttgtcaaagggcagccgcttcaacccctacccattaatttaaaagggtatctcgtaatcgccgacagcggtcaaaaggggcaaacaggtgccgccgtcaaaagcgttcagaatcaaatgatgtccaatccagaacaaacgcaacccttaattgaccatttgggttatctaacgcaacaagtcgcaagaaatattgcccaaaacgaattaacggtacttggcgcgaacctcaaccgtgctcaacttgatttgcgggcactcggtgtcagcaatgcccgtgttgatcatttgattgatgtggctaatcagaccggtagtttgggcactaagttaacgggtggtggccgtggtggctgcattatcgccctggccgctacgcaaagtgctgcggatgatttggcacaagccttatcagcagctggtgccatcaaaacttggattcaaccactacacgcactttaaaaaaacattaggagtattactatgggacaatcaattacagccagagcacatacgaatattgcgctcattaagtattggggaaaacaaaatccggaattgattattccgtataacagtagtctttcaatgacgctagatcatttttatacagatacaacggtccgcttttcaactgatttgactgctgaccaaattagctttaatggtgccattgcggataccaaaactagtacgcagatgagtcagtttctcgatttaattcgaaaacaggcgcatctgcctttatttgctgctgtggaaaccattaatcatgtccccaatgctgctgggttggcctcttctgcttccggttatgcggcattagctgctgcaggtagtcgtgcagctgggcttgaacttaacgatcgggatctttcgagattagcccgccgtggttctggctctgcaacccgctcgatttatggtggttttgtggaatggcaacgtgggaccaatgatttggattcatacgctgttcccgttcaagaaacagttgattgggacatccagatgattgcgattgtcttaaatgatcgtcaaaaagccatcgccagtcgtgctgggatggcgaatacggtggccacgtcgccctactacccagcatgggttgaaaccgctcaagccgcaattccggcaatgaaggccgcaatcgttaagaaagatataaatttggtggggcaattagcagaacaaagtgcgatgcagatgcatgcgacaacccttagtgccgtcccacctttcacctattttgaacctgaaaccctacaagcaattaaagtcgtgcagaccttgcgccaacagggtgtttcttgctattatactatggatgctggtccaaacgtgaaagtgatttgtaccagtcaggaaacacctcagattttagcggcgcttgcgccctattttagtcctgaacaactccttgttgctaaaccaggtcctggtgtgagctatcgataatgcaaatttaagttaaacgtgaaaggttctgatggtttgataacggctaaagcgcccggaaagctgtatattgctggcgaatacgcagtagtagaaacaggttttccggctattatcgtggctttaaatcaatttgtgacagtcacaattgaagagagtcatgaatatgggagtattgtgtctaaacaataccaagaaaattccctttattggcaacgacaaggtgatgaaatggtttttgataaccgcgataatcccttccattatattttgtccgcgattcgcttaacggaacaatacgcacgtcaagcgggtaagacactgcgcgtctaccacctacgggtaaatagtgatttagactctgctgatggtaaaaaatacggcttaggcagttcagccgccgtaaccgttgcaacggtaaaagccctctgcgccttttatgaattatcactatcaaacgaccaattgtataaacttgctgctattgcgcatttagatgtgcagggcaacggttctttaggcgacattgctgctagtgtttttggtggctgggtcgcttatcggtcatttgataaacaatggcttgctgacattcgaccaactgttagtctaacggagctgctcgaaatgccatggcctagtctttcaatcgaattattaacaccgccagcagagttgtcactcttgattggttggacggggtcgcccgcttcaacctcgcacttggtggataaaattgcccttgctaaaacagaacggcaagccgattatcaaaacttcctcgcagctagcaaagcttgcttagaagcgatggtcgaagggtttcgtcgtaatgatttagcccagatccaagctgaattacgccacaatcgtgccattttacaagatctcgctcacttcagtcacgtcgctattgaaacgccaatattacagaaaatgggcgcattagccgaggcaatcggcggtgctgccaaaacatctggtgctggcggtggtgattgtgggattgtcattattgatcgcgctatcgaaacagaggccctctttgaacaatggcgggccaatcaaattgaacgattgaaccttgcagttcacctcgtagattaggagcttacccatggtcagacccaaacaatccattcaatctcatcggaaagatgaacatgtctttttagcggaaaaattccgccatggtgatgccatcaatgactttgatggaattcggtttatccatcaaagcttacccgaaattgcggtatccgacgtggatatcagtaccgattttgccgggactaactgggccagtcccttttatatcaacggcatgaccggtggtagtcagcagacaaagaaaattaacgcacaattagcgcaagtcgcccaaattaccaacctaccaatggcaactggctcccaatcggtagccattaaagatccgtcactggcggatacatttagcgtgattcgcgaattcaatccccacgggtttgtactcgctaatattggtgctggtaatgatttgaatgtgtctaagcaagccgtcgcaatgacccaagccaatgccctagaaattcacgtcaacacgccacaagaaattgtcatgcctgaaggtgatcaagatttctactggttagacgagattgctaacattgtcgccaatgttggtgtgcccgttatcgtgaaagaagttggttttgggatgagtgctgatacgattgcgcaactcaagcaaatcggtgtacaattcatcgatgtttctggccgtggcgggaccaactttgtcacgatcgaaaacgaacggcgtcatgataaagcctacgattacttagctgattggggccaatcaacggtcgaatcgctctttgaatcacgcgctttccaaaatgacgtcaacatcctcgcttcaggtgggattcggaatcccctagatatcattaaagcacttcggcttggtgccagtgctgttgggatttccggtcaattcttgcacatggttttaaaagaaggcccgacacaaatggcggaaaacttgctcacttggcaagcgcagattcaagagattatggcaatgcttggcgcacgcgatattcaagcgctccaaaaggcgccaattattctctcgcctgaattacggcattatttgaatgaacggcacataacattttaagcagcaaaagcccggtagaaggatttcttctaccgggctttatttgattgcttaattagcaactacgactttgccaatcatttggttcgtttcgaccagttgatgcgcttgccgtaagttggctgctgaaattgggcttaagcactttgtcagggttgattgcaatttgttttgttccaataaggttgcaatctgtcctaagataatgccttgactcgctaaatccgttgtttgatagtaggtctttgagaaaacccactcccaagcgaactcgacccgttttttagttaatttttgtaaatcgaccgggcgatgattttcagtgattgaagcgatgcggccattgggcttaatcaggcgcgccatactctcccagtgttgatcgatgttattcaactctaatatataatcgaccgtttgatagccgagtgcgtgcacctgttcaatgagtgattgatgatggttaacgacttgatccgcaccatgggccagcgcccacttttgcgtttccggacgggaggcagtcgcaatcacgtgcaatccggccaaatgtgccagttgggtggcgatcgaaccaaccccacctgccccattaatgattaggatggtttgatcatgattagtggttcgatcttcaaaatcaatgtgtaatttctcaaataaagcttcccaagccgtcagcgctgtgagcggcatcgcggcagcttgcgcgtccgttaaattctgcggtgcttttgcgacgattcgttcatccactaattgatattcgctattactacctggtcgtttaaagtccccaacataaaagacacgatcacccggtttaaataacgtgacggcattgccaattcctgtgacaatcccaacagcgtcccagccaagaatacggggcgtttttgattgtcctctacccccttttcgaacgccaacatctacagggttaactgaaacagcggtcacttgtacgcataaatcgtgtggttttggtttgggactggggagattaaaagccattaaactttcttcatttgtaatcggtaaatgtttggtaaaaccaattgcttgcattaaaaatgccttctttcttattcaccattagtctaaaacattaattgccccgtaacaatcgtgtatcgaatgtaacgagttacattgttttcactaggcaaatgactgctagcggactataatggcggtatcaaaggaggccatttcatggttcaagaacggcacatttatgattgtcaggcgggctgcccggttgaaagcacgcttcaaattatctcgggtaaatggaaaagtgtgattatttatcaacttttgcaacattcaaatctccattttgatgatttgacgcgcgctttacccgattgttcgcgccgcatgttagccctacagctggaagaattaattgcggatcatgtgattactaaaacggtgattagtctccggccgttaaagactgaataccaactctctgaatttggtcaaacactgagtcccgtgattaacgcaatggcaacttggggaacttattataatcaggttgcacaacaggatgttggatactgtaatttgcagtaatgcctaaatttggatattcgctaaagcacttgacaaattaacttggataatgtaaaaatatagttgttaaaagtataagtaaactttgataatgaagtggtgcatattgaaagaaacgaattatgtcgaaaataaagtctatgaataccgagtactccaacatctttctcaagaaaaattaggtcaagcggttggtgtttccaagcaaaccatctatgcaatggaaaaaggcaactactcacctagtttgattttagcctttaagctcgcacgattttttgatgtaccaattgacgttctattcacttatcgggaggcgtaacaatatggcccctactacactttttaaatcaaaatgcccatgtaatcgctggtgtggcaatcggattaatcatcatttcaattctgtttttctactatggtataactagaattggacgttcggatgaacgctcacagcttattatgtatcgcgtttttaaaacgatgtttgcagcgtgtttattatcgatgattttatttatgacttttgtgccagaccgcttaacagcagttcgagattggtttacaactctattcagtcttgtatttatcagtggcgcatgcgctgtttttattgaaccacggcgtaaagtttaacccttaaaaaaaaacggtttagtcaatctaatgactaaaccgtttttttaatatgttgtttttcgtccttttggaattaaataataaaagataccgattaagatgagatcaatgatcatcaatccaataaaaatcgctgttcgacccgttaggtaaaagaaccaactaccaattgagaagccaatgattgagctaacaactaggtgcagcgcaaaaatttgggtttgtgccacgcggaatttacgatataaaccagtgctgagccctttttgtgcgtgataaccattgataacttggctaaataaataagtgaaaccgaccgcgatgatcatgaggacggcaattaccgcgattacacccgcattttgacggagccagttgacgccgactaacggcgtcgtcttcggtgttaaataactgtgcttagtcgttttgaaaatcttttggtaagttttcagatgcgctcccatctgcggaccatcaaccaatacggtgactttattcagtgggcgatcatttaatacaaattctggtgacgtggatacaaaaatgtgctgatcaagcgtagttgtctgattcgtaccgacaacgccaatcacggataagtagcgaccatgatcttgataatacgcttgactagctggtttgtagagttcagcaagtcgtgattgaccagcaacgacgactggaatctgtgatttgaaatcgtaactggagaagaaccggccgtcttttaatgggacactcgataacttccctttcgcatagacatatgagaaccgggaatcaacgttgaattgaatttgaaaatggcttaatttcgcggcatcaattttttgaatggttttttgaatcgactgttgactcttagaattaaaaatcacagcattttctgataaactattgtgatttaagcgttggctatagttagtttttgcacgttggctaatcgttaacatgcctagaactgttaaaccaactagtaaacaatctaatattatttttttcaggcgcacagtgggccctcctttaaagcagactattgaatccagtaaaaccgatcacgcattaaatcgaatgggcgtaagtaacggttaatccgtgataaacgggcgtcgttgtgataatgggccgccgtccaaaaggcgtgactattcgtggcgccaaaacgttcgcctaagcacaacaaaacgggggcatttggcattgcacgaagttgttgcagcaattcataatcaactgggacgccgttgggtgaccaggacattaagactgcatcgacttgcggaccatattttgggaccgcttgtttggcgtcaagagctgccactgacgtgactaattggcgccctgtttcattctcggcagtccaggctaaactatcggtacaaatcacatcagcgcctgcctgccgtaaaccagcacttaaatagccgttaccagccatgacttctagaaaacgccaattgggaaactcgcggacaatcgccgccgtcaaatctgtagtgatataggcccacatgccaaagcgattttgcaaatattcacggtaattgcgcagtaagtggtcgattaactgtaactgacgttgaacctcagccacactagcggcgctaaaagccccctgttcagcctggagtaatatttctaaatacagagattcatcaattcccaaaacgggtaaattatgtatgggcaagccgtcctgttcaatctgcaataaactagttaaaacagcatgaatttgtacttgaatggctgggacggttgcaaaaaaacgttgactctggcgcaatttctctggataacttaactgtatcataatggattccgtttctaatataagtttctcttaaacgattagaaaaaccttcccaatcggaaggccaaatcgaacgttttaacgaatcccgagtgcaatgcgtgcataacgggacatcttgctggtatcccacgctgggtaccagacgagattgactttaatttcattgacttctggaattttgcccattgcttgatgaatcgaatccgttaaaacatcggttaagggacagcccatcgttgtaagggtcatatcaatcgtacataagccattttcatccaggtttaaaccgtaaaccaagccgagattcacaatgtcaatcccgagttctggatcaatcacggtctcgagcgcggctagaatccgttcctttaagtcttcaattgctgcatcatcttgtggttggtctgccatgtgtcctgcctcctggtcactctaatagctctattatactggttcaaccgaccagttacaactgacgatcattgacaacaatccgcataccccctagaataaaaagacatatcgtgttttaaccaaacacgtttttaaaaggaggcgccgctatgcatcaaaaattgattgcactggatttagatgggactaccctcaattcagatgcccaaattacacttaaaacgcaacaaactttaactgaattacaaaacgctggccacattgtcagtattgtcacagggcgcccaaatcgtttgagtgaacctttctaccaacaattaggtttaacgtcgccaatggttaactttaatggggctttaatgcacattccgggacaagcctgggccggtgaatatcaatatacgattaataaagacattgtctttagtctcttccaactaaaagaacgctttaagattcaaatgattgccgccgaaggtaaaacgatgtttttagctgatcaagcttatgccaacacgttttctttcttccccacaacgttgaagtccgatgaaattttaacccgcgaatcgcttcggcaagacccagcggccgtcacggtttttgtggaacgcgctgatcaagatgcgttacgtgctgaaattctgcgccaattccctgacgtttccgtcaacacttggggtggtcctgctagcgtcttagaaattgtgcatcatgggattcacaaagcaaccggcctcgcaaaactagcggcacactacgacattgatcaatcagatatcattgcctttggtgatgaaagtaatgatttggatatgttagcctatgccggtaccggggttgcgatgcaaaacgcaattgcaccgatcaaggcgattgcagacaacatcacaccactgacgaatgcgcaagatggtgtggccaattatttacggcaatattttaagatggattaatgaaaaagcgattcgacaatttctggtcgaatcgctttttttgatggatgaaacgtgcttttcaagctaactttctgtgcttagctacatccgtcaaatcaccgattttgtcggtaatctgcctgattaggctaatcctcagaagatacccggcttattgcacactctattctgaaacgtgctccgtcagatatacacttccggttagttacataccgcaaacgatcggctacgccgctcattcacggtattagactaatcctcagcgtatgaccatctgacgtcgcactctatttttcgtcgctctttagcacgccgcctactgagtagtggtctggttgcatttcgtttaggacaacgtgcacgtgttctgcaggtgcgcctgtgtttttagtgattgcttctgtgacgtctgcacagagttgttttaattgtgcttggctccggccagcgattaaatcgatgtgtactaatggcatgtgtggtgcctcctttaattgaatacttatattatgcctgttttaacgcaattgagcaacggtaattactgtgtttttaagcaaaagaatgtataataatagctaatattgatttatctatggaggcattacaatgagtgaacccctttaccgtcaattgacggcctgtaccagtgttttagttggtaagaaagccactgcagacggctcaactttaatcgcacgtaacgaagatagccaggcagcttggcctaaacatttaaccatccatccccatcaaaagttaacgactgccccgcactttgtctcaaaagacacgggtttttcaatcgatttaccacttgaagccgcaaaatacacggcgacacccgaatggaccgatgaatatggactattcgaagaagacggcattaacgaatacggcgttgcgatgagcggcaccgaaagtgcttatagcaacagtcgcgttctcggctttgacccctacatcgacaacgggattgctgaagaatccatgattacagtcgtcttaccttacgtgaaaacggcccgtgaaggtgttgcgcggctaggcgccatcgttagtgaatacggcaccactgaaagtaacgggattctcttttccgatgtcgatgaggtctggtatcttgaaatcggcagtggacatcactgggttgcccaacggattccggatgatagctatgccgtggttgccaatcaactcgcgattcaagaagtgcaattcgatcaaccggattggttcatgacttcagacgggattcaagattttgtgcgtgataatcacctatggcaagctgatacgccatttaacttccgcgatatctttgggaccaaagaccaaagcgaccttgtttacaacacaccgcgcgtttggtacggtcaaaaattgttaacgccatctgtcgcacaacaacctcaagactttaacctccccttcttacggcaagccgatgcgcccattcaagtcgaagatgtcgcgcgaattctaggctcgcattatgaaggcacggtctacgatccaatcggtcacggcacaccacaagaaaaacatgctttccgcccaattagtttagcaaagacgcaagaatcacacattctccaaatgcgccctaacttaccggtcgatgtcagcgggcttcactggttatcaatgggtgtcacggcacaaagtgtctacgtgccattctatgcgggtgccgatgacgtcccagtcaattaccaaaaagggacaaaggattacagtcaagattcgatctactggacctataaattagctggtattttggtggatgcacactacgccaagttcgccaaggacttggaacaaacgcaaaaacacatcaatagcttaatggttcaaaatatcgtaacaaccgatcaagcggttgctgctgaaaccgatgcggtccaacgaacgatgttgatgaccaagggctctgcaaaagctgcgcaacttgcccaacacgaaatggaacgcctcaccgcaaaactgattacggatagcgcgaacctatcaccactcaactttacaacggatagtaatttatagataaaaatggccccacatcgtattttgatgtgggaccattttatttactcagcaatcatctctctaatcttgtaagttccacttgcgtgtctaacttctacccgataaggatgtccatggacaactgatttagaaggagtaaatacatttccatttagggaaccatagtagttttggccattggtgacttctgccagatagctgttgtttcctaatacgactatcttataatgcttaaataattcgttagcaaaggtaacgacgattttattatttttaacactcatgtcagcaactaaagtgttcaagaacagttgctgtgcatggttaattctttgagtcaatatcgtcttttccgagcccttaactgcgttaatttgtgttcgtaattaatctaataggtcttgtgtgacctcaggtttcaactgatcgtttgtttcaaataacgcttcaacttgacgtttcagaagaagaatatcctgactaatcattttgagaatgtaagacttgtgcggtaattcagccactacggtaacaacatgtgcatccgcttggttaggaattgttaagacattatcgtcgagctgaccaccactactgataccatttttgacctctgcaactggttggtcgtcaacaagtaccttaattttcgcatagtctttaaacttctcatcagtaaacgataccactaatgctgattgtgaatccagttgaatatctttgactaatgtagctaggtatttgtcttctaattttgtaaatagttctaagagtctttctttatagtcaaaagtagaaggaagagcatcaattcgatttcggagagcatctagtttagcttgggttagaattgtaccaatcggttctgatgcattcaaatagtttaataactcttcttcaagtgcaatactatcaattgagtgttcatatcatttaaaagtaccatttttattttgctgttcaattgtaatcacatcagtcggtttaagcatctcgattgtttcccaaacattatttgttaacatactttcaattggctctttattgacgagtttggaaatcacttgtccattctttttaaggattaattgctcatccttaaatacatcggtttggtagtcagtcaggttaacttgaataccgtggtcattcagcgatacggtatcgattaagcgcatgggtaactgtttattagtttctttatcatttaaccaaatagcttctggtaaaggtgctaattgactaatttcagctttaactgctgcggaaatatcaaatccccattgttcgaaataaggctgcatattataacccgtaattctagaaacatttagaacaaagttttgcatccgttcattgtctggtccaaatgcaagcttgttttcacgatagtattgatgtaaaacggggtaaaagttatcaccaaatgtatttcctaattgaccaaacataaccatctttaaattattattttgtgcgttgaattgcttattatcagattttagataagtatgcatttctgggtagtattgatctaacgatgttattttaccagtcaattctttttgagccgctaatgcataaatgttaacacttgattctacaacagcaccccatttccaaggtgtttgttgtctctgatgaccactttcatgccagatgctccaaccttcatttgtcttcagtagtcgttgcaaagcgcgatcattatggaagcccataaattcattttctgtatacatatacaacttaggtgactctaagaaatgttggagatggcgatcaacaaagtttactggatttccttcagtagtaatgcctgaaacccgatcttgtgccgttaaaaaccgatcataataagtcatcagttctttagggtcaccgagatattttttagccattgcgtaactaactgtaattaatgctttgttactgaccaactgcacatctttagcattcgtcatttccgccatttgtttctcaaagtctgcgacgctagtttgatttaaatcgaaatatggcattgatcctgttgcccctgatattgtgattgttgcttcaccagaatcattaggattagtcacataaatcgggccctcgttttcaacggtaatcgttgtaatgccctttgttaatggatattgtttttgattttctcgttcgggcgaaccaattgtgatagataatgaatcttgcatcccctgagcaactgtcaaaacatcccctttttgggcgtataaaccgctaggctctaaacttgagtagcgtaatgttctgcgttgccggtctttttctttaaaaacatcaccacgaccaatataggttttcatttcttgtggtgcttttagattttgctggtgcctcaccttggatttgaggctatctgctagcacgctactcgctaaattttggtgattgtcacttggttcagccttaactgtttgtatagaactgatggtgctagttgttaggattcctaacgctaaaattccgattacattcttgatagtctcatcccctaaaagtattattatttttataacatattcagattagcatggactgctgaaaattgtctattaaaaaaccctaatgatttctataattattccattaatattaaaaatgtcaataatgataactacaactattacatttaagaataaatcgctctataattgtgatgacagtgtttacaattgtgtaaaataaaataagacccaccacttattaagtgatgggtcttattttattcagttataaatgtattataatgaacacccttattaaagtaattccgctaccaatggccaattgatcatcttccaaaagttttcgatgtaatcaatccggttattctggtatttcaggtagtacgcatgttcccaaacgtcaagtccaagtagtggtcgattacgactcataagtggtgaatcttgattaggcgttgtcatgatttgtagttcaccattttgatcgataacaagccatgcccagccagagccaaatacaccaagggcagcttcggtgaatgcttcttggaacgtcttaaacttcccaaagcgggcttcaatccgttcgagtaattcccccgttggtgcttctggcgcattcggtgttagaattcgccagaagaaactatgattggcatggcccccagcattattgcggacaggtgcttgaagattctcaggtaaatcatcgatgtgtgttaacaaatcatgtaatgatttacctgctaaatcggggtgcttggctagcgccgcgttgagttttgttacataagtcttatgatgtttgtcatgatgcagatgcattgtttcagaatcgatatacggctctaaggccacatattcataaggtagtgctggtaatttaaatgtcattgttcaccctccttgttataacctcatcatacaagtctatggcgttaaaaagcgaataatatgattctacgaccattgaaaaaagccgactaatgtttattagccaactttttttgaatcctgggtagctgcgtatcgatttctgccaacatcatgttcggtgtcttatgttggaaaaaaatggtgtagtccgcaagccgataatactttggtcgtcgtttgtgatacagttcgcgtaaaccatcgtggcccaattgattcacaagtggccgccgatcattgcgcgaaacgcggcgccaatgtgcttcataactcccatttaggaaaaaaatggggatatgactctgttcaagtaaatggcgcgtctgagcatcatccacgaccccgccgccggttgcgataatcccatcgtgttggatcaatgtctgtaaggcctcaaattccatttgtcgaaatgcagcctgccctttttcggcaaagatttcgttaatcgtcatttgctgttcttgcatgatgtagcgatccaaatcaatccagtcacaatggtaatgatgtgcaactttgcgtgcaatggtcgttttaccagaccccataaaaccgattaaaatcagttgcatctagtcaatcaacccctatggttctatttcaaatatattgttggttccaagactgctccgcacatacggtcagttaaacactctttacaagttagtttcattgtaaggtatctgtgggttggttaccagtttttttttgaaaatagattagccgctaaagtcgttagcggtatggattgaatttttggaacaccaattgcatcgaggtaaacaagattaatggcatctccttgattcttcttatcatgtaaaagttgcgtgaagagtcgatcactcataagtaacgggctatctgtcggcaagccgaccgcatttaaaacagttgtaatcactggtgttaaatgcgcttcagtcagtccactttgttcgactaagtgctgcatggcaactaacccgatgctgaccgcttcaccgtgcatcaggctgccattggccagggtttcaaccgcgtggccaatcgtatgaccgtaatttaataattggcgttgattactttctttttcatcggccatgacaatctgtgccttgtagtgcacactttgctgaattagtgtttcagcctgcgctagaatcatatgcgcactttgaatccctgtcacctgttgccaaaatgtcccaccgttgagtgcagccactttaacgatttccgcataaccggccagtaattggcgttgatccagcgacgttaaaaagtcgggatcaatcaatactaaatccggctggtaaaaagaaccaactaagttcttgccagctggtaaatcaagtgcagtctttccaccgacactactgtcaacttgtgccaaaagcgaggttggcatctgaataaatgcaatcccccgcatataggtggacgcgataaaccccgccaaatcaccgacaaccccaccacctaaagcaatcaccccgtcatgacgggtaaaattcgccgctgccagttgggaataaagtgccattgcttggtcaagtgatttcgacgtttcaccagccggaataataatcggtgtgacttgatagccaacttggattaattgagattcgaccgtttctaaatacaacggggcaacattcgtgtctgtgattaatgcgatttgacgaggtgtccaaacttgcgcgatttgttcagcacagatgtgatacaaaccagattggatccgaatctgataatttttttgtgtgaggtggacatcaattatcaccattagtgccgccactgtttgacgactgcatcaacggcccacacttgatgacacatttcaagataagtagctggctttaaggcttgtgcgccatcagaaaaggctttttctggatgatcatgaatctcaacttgtaacccacttgccccagttgcgactccagcccgagccattggcgtcacaagatcccattcaccagtcgcatgactcggatcaattaagactggatagtgcgttaatttttgtaaaactgggacagcatttaaatcaaatgtgttgcgcgtatagtgattgtcaaacgtccgaatcccgcgctctaacagcataatttgttgattaccgttggcagcaatgtactcggcagcatttaataaatcatcaacagttgctgctaagccacgttttaaagcaacgggaacgttggtttttccaacagctttcaataatgaaaagttttgcatattgcgcgccccgatttgaaaaatatcggtatattgcgccactaaatcaacatgcgtttcatccatcacttcggtcacaacgtccatttgataagcatcagcagccttgcgcaatgctttcaaaccagcttcgcccatcccttgaaaggaatacggtgatgtccgcggtttatacgcgccaccccgcaaaatagtcgcaccgccttctttagcaactttggccatcgccataatgtggtcagcagattcgaccgaacaaggacccgccatcaccgtgaagtctgcaccgccaatcgtactgtgtgctaattcgatgaccgtgttttcgggttggaatagccgactgccaagcacgtaactcggttcatccgtggtggttgccgcaatgacttcttcctctgctggggtaaaatcaattgcttttgcaccgatcaccgctacatggtgcttaatctgatagacattcggatttgtcgtgcgttgtcgtgcgcaaaaatcatcaatcagcgctgaatcagtatttggtttaaattgaataatcataaattattaaaactccttcgttaaagcatgatagatgggatcggtttgtaggacctggcccgtccagaattgaaaactcaacgcggcctgttcaactaacatgccaagcccgttttgggttggatgaccacttcgagccgctaactgtaaaaaagcagtctgacgtggcgcatatattaagtcggcaactaaacaagtcatcggtatttgatcaattaaaggtgctgccagcggtaatccaggggtattgaccatgccaagattcgtggcgttaatcacgcaatcagcattactgagtgcttgttggagtacctgttcatcggcataattatgtagcacgatggacatcgaatggtgattagcaatttttgccagtcgttgttcaaccgccgcataagtcgtattttgacgtttgaagacctgaatcgtcgccacaccataacgagcggcggcttcgataaccgcgagagcagcgcccccaccacccagaataacaatctgctgactagctagattgggatatcttttctgcaaagcgcgccaaaaaccatcgccatcagtattcgtgcctaccaatttacccgatcgtaaagcaaccgtattgatggcgccaacgagttgcgcagttggcattaactcgtccattaatggcacaagcgactgtttatagggcattgaaagattaacgcctgccacaccaagcgtccgaatcgcttttgcgacatcttgcggccgtgcttggctatcgaaaaccagataccgcgcgtcgatttgatgttgtttaaaacccagattatgaatcatgggtgacaagctatggtgcgctggatgcgcaaccaagccgtaaagagctgtataacctgatatcattacattttcctctaaaactatcatactttacttaatgagatttttaaatggttagtatcaaaaagtcatgcttaataaaggttccaatgaatattttaatagacggttacgctggttcttcccgaaaaagaccaattttagccaagtaacgactgatgagatcctatcagcacttgaactaattaatcaacgaccattaaaaatacatcatcaacagactgccattgaaagattccgggcttgttcggattaaacttgtaatttgccgacgcttaaagaagtggtcaaggaaaataatgaccatcctagttatgcgacgcgtttatcaatttattcaagtcaattagccggtttcaatggtgacgtagaaaattaagccaaaaaggccttagcaaaatcagtttgctgaggcctttttttgataacgttttaaatgataactacttgtagacggcgagtggtttttccgatagagttaatacttatagtttagttgaggagtaggatgaattaatgcggaacaaaatgacaatgagcgacaaattattatatggcgggctactggcagctgcggggggctttgattcttacacttatttggtgcacggggaagtcttcgccggattacaaacggggaatctaattttattaggaacccatttggggcagatgaaatggtccgtattattacggcacattaccccgattctcgcctttatgttgggaacaatcttaacgcgcattttacaacatcggtttgaaaaagacgaatcgattaacaaacgacaacggattatcttggggattgaagtcttggtcttaacgattgttgcgggaatttcaccgtatgtaccggatattgttgcaagttcacttgtttcaatcattgcggctgcgcaattacaggaatttcgtgaattggatggtggcccatttacatcattgatgatgactggaaatgtacggacgatggcggaaagtttttatgacgctgtttttaaacatgatcgtaaggcagccgataagggctggcaaattttacgcatcattatcagttttacgattggtgcagtgatggtcggactatgtgtttcattcttaggagaacggacgttgattttatcagcattattcttgttgatgacgatgctaattttacaattaaatccagacaagaaagtttagcctagatatgttacgctaaaaggtaacttgccaaggaggttaatagatgttctttttaaaaggaatcttgatgggatttgcgtttgtcgcaccaatcgggatgcaaaatattttcgtttttaataatgccatgtcgaatacaacacggcgggcagttttcaacagtttgttcatctggttatttgatgcgctcttttcactcgtggcgttttatgggattggcgcactgattgtgcaaaacgatgcggttcggttagccattatgggaatcggtggacttttgattttatggattggatacaccattttgaaaagtgcccgcagtaccgttacgtttggcgcgttagaaccaatgccactggggaaggttattttgactgcatttgtggcggtttggggtaatccgcaagccttgattgatgggacattaatgctgggcgcattgcggggtggtatgacgagtagcgaggcgattccattcatcgtgggggttgtttcggcaaccgcgacctggttctttggtatcgccattatctttagccttttccggaaaaaagtttcaccaaaattcttgatgggcgtcaacttagtgagtgccatcatcatcatcgtgtatgggcttggtttattggtcaaagtggggacaacattgctctaggaagggatattgctttttaatttaccctgttgaatggtatccttaagtatcaaaacaaagcgagggagaacaggatgcgcaaaacaacaatcattgttagtttagtaatgctcggcctattgacgggttgtacagccaaccaaacaaaacattcagcaccccccgctcaaaaagaatcgactagtccgcaacaaacggttcaagctccgaaagtgacgcttgaaaaagcccgtgaattgtacgcaaaacaatatcctgcatcagatttaaccgaggttgagctgaagcaatggggtaaccaaatgttttatgaattaacgggaatgaacgacaatgaagagcttcacatgcatgtggatgctcgaactggcgcaaccagtcgattgtcgaaagaagcccttgatgccgatgaacaaaatggcgtcgagcgacaccaaaagcaattagcgtttgaccaattgttgacgcctcaacaagctcttcaaaaagcgcaacaatacttcaccgggaacgtgatcaaatggtcattggaaaaagatgatggccgaacagtctgggaagtagaaggtcatcaaaaacagcaaaaaatgcaagttaaattagacgctgaaactggcgcgctaattgaaaaagaaacggatgattaaagcagtatgtaaagcgccgtcgagaataatttcgacggcgctttttttgtagcttgtattaataaatttgttatcgatttgaataaaataaattagcattgcctaactttttatttacatttcattaaaacggcgtacaataaaactgttatcaagatcaaaataaggagtgaggataatgaatcaacaagaaaagggcaagaagcacaagctgattgaatatgcgaacggcccatcacttgaagaaattaatgggacggtcgaagtaccagagggcaaaggcttttggaagatgttactagcgtattcaggaccgggtgcattggtggcagtgggttatatggatccagggaattggtcaacatcgattactggtggtcagagttttcaatacctgttaatgtccgtgattttggtgtctagtttaatcgcgatgttattacaatatatggcggctaaactaggcattgtaactcagatggacttagcacaggcaattcgcgcacggacgagtaaaccgttgggcattgtcttgtggattttgacagaattagcgattatggcaaccgatattgccgaagttattggggcggcaattgctttgtacttattatttaagattccactgctgattgcagtattcattacgattttagatgtcatgctattattactcttaacgaaaattggttttcgtaagattgaagcaatcgttgtcgcattaattgtcgtgatttttgtggtttttgcttatgaagtagcactctcagatcctgattgggcaggggtgattgttgggctagtaccaactgctaagacctttgccaccgggccagctgttggtggactaaccccattgactggtgcgttagggattatcggggcaactgttatgccacataatctatatttacactctgcgatttcgcaaacacggaagattgatcgcaagaacgaagcacaggttgcacaaacagtgcgctttgccacttgggattcaaacattcaactcacgatggcatttttcgttaatgcgttgttattaatcatgggggttgcagtttttaaaacgggaacggttaaagatccatcattcttcgggttatttgaagctttgtcagatacctcaacaatgagtaacggaattcttgcaagtgttgcccggaccggaatcttatcaactttgtttgccgttgcattgctcgcttctgggcaaaattcaacgattaccgggacgttaactggccaagtcatcatggaagggttcattcacttgagaatgccattgtggttgcggcgtttggtaacccgcttgttatcggtgattccggtattaatctgcgtcatgatgaccagcaataaaccagccttggaagagcatgaggcgctcaataccttgatgaataattcccaagttttcttagcgtttgccttaccattttcaatgctgccactgttgatgtttaccgacagccgggttgagatgggggatcgcttcaagaatagttggttgattaaaagcttaggttggttatcggtcattggcttgacctatttgaatatgatggggttgccaggacaaatcgaagctttctatggtgatcacgcaagtgctgcacaattggctactgctgatcgcattgcatatgtgttgattgctggtgtgatggcattattggtttggatgattattgaattgtataaaggcaataagcggtttgaacagcaattagcaactgaaaattaattggaggttggtcacatgtcagttttagaaattaaacgaattttagtcggggtcgatgactcagaggatgcgttattagcgtttgattatgcaattgagcgggctaaacgcgaggatttagaattagtcattgtatcggtattggaaaatgacgaaatgaacgtctatcaagcattgaacaaggattttatccacggccaatatgaggatcttgaaaaccacctacgagaatatcaagatcaagcctatgtgcgcggtgtgaatcatgtgcgaacagtaattgcagaaggcgaaccaggcgaagcgattatcgaagatgtgattcctaaggttaaacccgatttgttaattgtcggttcgaaatcacaaaagggcgttgctaaatacttcggcagccaagccgcctacatggcaaaatacgcaccaatcccagtgctggtagtgagataaagagtgcgaaaatcgccggagatattctgaggattagcctaacaacggaagaatatggcgattgtagcacgtttaaaaaagcgtgtgttcggttgcggatagcaactgagtattttagattaagcggaggttggtgcaaccaaaaagcacgtttcaaaaagatgtcgataatttattttgtcggcatcttttttatatgctaagctgagaaaataaaagtttaagcggaggatagattgtggataatgaagtcgcagctttttgggatgattttgcagcggaatactatcagattcaacaagagtcacaggtgtcgattgtcactgacgttgtggcttttttacaggatcggcgattactgcctgttgagacagtggctgacttaggtggtggtagcggccgttatttgccacctctagtgcaaaacagtcaggcttatacgattatcgacatctcggcgcaaatgctccagtatgcacaacaagaagctaaacagcatgtaccagaacaacagattgcttatctacagcagtctgtggctgattttatggcgcaaacgccacaaaaaagctatgatttaatttggatggcgttaaatccggcaatcgaagccaatcaagcattactgacgattaccgaaaagagccgtcagtggtgtgcattcttacggctcactaaaaacgaggacgacttgttcacaccgcttgaacgttattttgggattgaacagcaagatcccaacactacaccggaaatcatcccggctgtggaaaacgtgttaaaagatgcgggctaccaagttagtcaacaaatttttcaatatcaaacaagtgaagttttcgacaggctatttttggaggcctattacgaagaattaccaacggaccaactggcagcttatctagatcaagtatttgcaactcaaaaaacacggaccagtacaacaacgcttgaatatacgttgctgtattggcacgtgttttaagagttaaattcccaccgccaccagtcctgtcggaatattttcaactggtactgggtagaatggcaggccggtttggatggccgcaatcatcatgtgattaagatccatgatttgatcggcgctgattgttgctgatggtgcaagtgcagttgggataatgagtgctgttagttggcgattgttaatgcgtgaaagaataatctcaggatcaccaaggtttgaatcgccgtgatacgcactagcggcccgttctgctaatccgagcgctttttgtcggagttcatgacgcgcatttgtgagtaacttgtcgagtaagtcgtcatctgaaagagaatcaggggaagtttggatggcttgatccatccggtagtttggattaacgacgagttccttgaagagatttaagttgccgggtaatgtgaccacgtaaatcggtgctttttcaggcagcaagtcatcaagatagcggccaatcacgcggaaatagttagtttgatcgataagttgttcattttcttttacaacaaaactgtgggttggacttgagaagccttggacgacttcgcctttacgctctgtgccaatcccaatttcaatggttgttggggcgtctttaggtaaaggataatcccgaatgacattttgttgaatggatttcaaactaaaagtagtcttgttgagacagagaatggtcccgttcagactcagacttaattccgaactgagtggacgcaggtcgggttgatcagcaattagaaaatattcagtcgtgatcggataatgaaggggttggctgtagtgaccagcagctgtgatgtaaaacgcaactgactgtatatgtgctaattcttggggagcggtacttagtaagtcctcaagttggttgagtaaggctttttcttcaggatagtcggtggttaactgttcacggatttgcttagaaaaactattgagcttaatcttgttcgcattaatggcttgtccgccagtctctaagttaatgaataacgagatgactggctgatttgaatcggcgagtaattgagttaaactttctggatataacatatcgacacctccgtttgattaactacaccttatcatattgaacagctacctttgaagaaagatgcctttgtaaaaaataagccaacgagggacttttaatcaacttgatggaaacggtatgctaaaatggtaagtaggttaacaagggaggatttatggtatgggagataagacgaaagtggtaacacccacgaagattagcaaaagtattcggacccgtttttttgtactacaaatggttgtgattctaatccttggcgcgctcacaattaaacttgtgagcggctttagtccattattgacggattcagaaattctaaaaaatacaattttgacagcttttggggcaaccttagtcgcgcttgtagtgtggtacctatcgtataagattattgcaatgcgcattcggcgccaaatcatgaataaagagctagaggatagctacacttttagtttgaatcatgctgctagcagtcttagcttacatattgtgtactttatcagtatgttggtgattgtctggttgatgttgagtgctcaaaacgtgcgccagtcgctagatggcttacaccttttcaaaggtgatcaaccgattgtccggctggtcgataatcacagcatgaagcaaatcgagcaattctatcaagctgataagcaacaaaagatgacgtatcttggcagcaatcgagatgttgcttatttcaagattaataatgcaacgattagcttaccattagccaagattcaattctatggtcaagatgaagcgccgactggccatcagaaacaagtgattcaacattatcacttaaaggatgtgcaaaataagaaatacctcaaacctaatatttatattagtgaatcaggcttacctaaggtggccattacgaagatgtaccaacattatgagccacaaccagcggataagattcataaactcgacattaaataggataactaccacaggagggctggattaaacggctttcatttggtacagttagagatgaatatttttttaaataaaggagatcaagtcatgattgaagcagtaaacctcagagcaggaatgacgtttgaacaagacggcaagttaatcaaagttttagaagctaaccatcataaaccgggtaagggaaacacggttatgcgtgttaagttgcgtgacttacggactggctcaattgttgaaacaacaatgcgcccagaagttaaagttgaacaagcaatgattgatacaaaagatgttcaatacttatacacacaagataacgtggcattcttcatggatcttgaaacttacgaacaatatgaaattcaaacagctgctattgaagctgaattaaaatacttattagaaaacatgaactgcaagattcaattcttcggttcagaagtgatcggggttactttaccaactactgttaacttacgggtcgttgaaacacaaccttcgattaaaggcgcaacagtgactggttcaggtaaacctgcaacgatggaaactggcttagtcgttagtgtccctgatttcatcagcgctgacgaagtccttgaaatcaacacacaagaaggcacatacgttaaacgagcagcaaaataacaagcttaaggccgactagtcccatagtcggtacttcaaagtgaagccaagatggttttctttcgataaaagaaggaatcaccttggctttttatgtttgggtaaagggacaaaaaaataacagagaagcaacttatgatggattgcttttctgttagttatcaaaaattatttgacgcaaatcgtggctttaacaaacaattttagtgaatataaacagttattacggtaacgagtccgaaaataacgccaggaatgttagaaataataaccggccaatctttataggttttattccagccataggcggtccatagacacccattaattgttgcgactaagggctgtaaaggtgagacaggtgaccctgaaaaattagcgataatttgggggatgtatgaaacatacagcgtaatacaggtgattgttgcaaccttgctaagtaattttaaacgtttaactttcttagggtggacggcgttttcgccggtagggtattcgccagcatcaatgcgcataatagactccgtttcatgattgaattttattatatatggttgacttgaaaccgcttaaattctatagtgatagtatgcacgaagtgaaagagagtggaggttttacgaatggcaaagaaaataattcttgattgtgatccaggccatgatgatgctgttgcaatgatgttagcatacggcaatccagaaatcgatttgttggcagtgacaacggtggctgccaatcagacgttaacgaaagtgacgcgcaatgccctcgcagttgcgaccatgatcggcatgcacgatgtaccgattgctgctgggtgttcgcgaccattaattgaagaaattaaagtagcagctgatatccatggggagactggccttgacggggttgttcttccagaaccaacggtggcgcttgaaaaaagtcatgcagttgatttaatcattgatttaattatgacgcatccagctaatacaattacattagtgccaacaggtgcgttgaccaacatcgcaatggcggtacgcaaagaacctaagattgttgaacgcgttaaagaagtcgttctaatgggtggcggttatcacgaagcgaatgcgagtgcagtggccgaatttaacattaaatttgatccagaagcggccaagattgtattcaatgccggctgggatgtcacaatggttggtttggatttgacgcatcaagcgttagcgacaccagatattgttgaacaaattgaaggcattcatactgaaacgtctcagttcgtggttgatttgttagcctttttccgcgatatgtacaagaaggggcaaaatttcgatgcaccgcccgttcatgatccatgtgccgtggcttacgtgattgatccaagtgtgatgaccactaagaaagtgcccgttgatatcgaactcaatggaacattgacgcgtgggatgacggtcgccgattttagattcccaattccaacagactgtcacacatcagtcgctgtaaaactcgatcatcagaagttctggggattagtggaagacgcaattaagacgatcggctaaatagtcaaaatacttgagtagagaaggcgttgtacatgtatcacgcattagaaacccgttatcaagggatgcaatataaccgcgtcggacattctgggttgaaattaccagcgatttcattagggttatggcataactttggtgaaaccgataagatggcgactcaaaaggaaacgatttttggcgcgttcgatatgggcatcactcatttcgatttggcgaataattagaggccaccagcgggcagcgccgaggaaaactttgagcggattttacatgataatctgcgtcgctatcgtgatgaaatgattatttcatcgaaggctggctattatatgtggcccggtccctatagtgagtggggctctaagaagaatattatcgctagctgtgatcagtcactaaaacgacttcagtcagattacgtcgatattttctatcatcaccgaccagatccagatacgccgattgaagaaacagctcgggccctagatttattggtgcaacaaggaaaggcgctatatattgggatttcgaattattcggcagaacaaaccaaagcgattacgaaggttttcagagcgctcgggacaccctttattattcatcaaccacgttataacatgctcgatcgatggattgaagatggactaacggatgtcttggcggatgaaggtatcggtgcaattacgtttagtccgttggcacagggattattgaccaatcgttatttaaacgggattccagccgattcgcgggcaagctcgtccagatagtccctccctatcacctgaaaaggttgatcaaacaatcagtacggttcaagaattgaacaaaattgcgcaacaacgtgtgcaatcattggctgaaatggcgcttgcgtggaatttacaacagccgactgtagccagtgtgttagttggtgcttcgcgcttgagtcaattacaagacagtgtgcatgcactagataatttaacgtttacggccgaagaattagcggctattcaaaaaatattagcataaataaaacgacgactagctacgtaagctagtcgtcgtttttttttgtttttattcagctgtttcagttgcggttgcgtttgcttggattttaccaagaatcgtacgtgagaaaggtcctacgatgattaattgtaatggtaaagcgacgataacgttcattaaccaagtatgacggtagacgctacctaagtgtgcagggataccaccttcgataagaataccgaaaagtgacatacatgtaaccatgccaagaatcatcaaacatgaaatcgtcaaaatcatgactaatttattgtccttattaagtggtaaactaaaagcaatttttttggcgattgccccaacgatgaaaacatcgaggatgaaagcgacgatgaagcctgggattaagccggtgaataaagcgccccatgagaggctatcgtggaggattaagttatagatactcattccaagtaccatgcaaaaacacattaatgtcgtaaaaataataccttcttttttattggttggcattttaaatttcttctttctgaaaagttaacagatataaccgtatcacataaaaaatttcggcgtaagcttttttttcagaaaatgagaagtttcttctttttcaatttcaatgggaatctcgccatcatgaacggcgtgaaaaatcgaaacgagcaataatgcgcagacaaaaatcaatgggaacccagcaatcacgcaaacggcttgaatggtttggaaactaccgacaagtacaattccaagtgaaaatagaatgaaaatgatcacccaagccatccgattccaacgattaggttgttctccgattttcaattcaagactggtaaatgatgagacgatgaaggccgaagaagagatcgttgtcgccaggaaaatgaaacatgacagacagaaaattgctaacatgataattttgaacggtaaggtcgtgatgaccgccgcgatgacagcggcttgtccttgggtattcaatagatgaacaagatcgatttgaccggaacgttgtaagaagagcgcataaccgccaagtacagcgtaaaagctcatacaactaaatgcgccgtatgtcgccattcccaataaaacttggcgaatggttcggccgcgtgaaatccgagcgatgaataagcccatgacaggcatgtaagataaccaccatccccagtaaaagagggtttcgtgttgtgcgaacgcactgtgtgcaccagtctgatttaaacttaaacgcccgaagttaccaaagagatggaagacatcgcggccttcagcgccaattagcttgaatgtcggaccgattagtaagacgagtaataaaaagccaatggcagtatagatatgccaagcactgagcttcttaatgcctttatctaagccggcatataccgtgagggtgaatagcaccagtaagataatgaagagggcaagtttaagccagatggtatcattcaaaccggtcattgtgctcaagacttttgaaatcacgggaatttccattccgattgatgagccgatgccccccataatgccgaaaacaacggtaaagtcgattaatttgcgaattatttttttgtaaggttgtggtccttctaataggtcgattgcggcgcttaaacgttgtacccgtaagttcttaacatagagagcgtagccaattgcgacagtcgcggtggcaaaaatcatccatgccatgggtccccagtgaaattgcccacagacgttggcgtagcggtatgcttcagccgagaaaggtttagcgccaaatggtgggttctgtaagtattgcagtggatcagtggtactaagcattaagatgctagcgtcaatcccagttgcaaaaaccatactcccccattggaagtcgttatattctggcttttcatttggttggccgaggcggatatggccatagtgactacaccccaaccaaaataggaaaataaaattaatgatataaataccaatgtaaagccatttagaatgtgccgtcatcacatcaagtagttgtgaaatcgactgctgaagcgtgtcaccccccaacattaaaaatgcggagacaatcccgaacagtaacatcgtggggatgaagacgactttatcaacattcttgcgctttaaaataatattcctcctgaatttgttaaagtctaggttgctggatcaaacaaaaaaagcgcccatacaattggtcaactgaccacctgtacaagcgcgttattataacgtatacaaatgaagaaacagcctaacttgatttacttcttactaataggatagcacttatctcaaatttgttaagggtcgattttacggccgtgcggttgttaaccaattaagatagtcttgttcgcggttaatcgcgtgttctaaaataagataatgaccatagtgcgcatccaccgcagcttgttggctgaaaagggtttgacgccggtcgagtaggtgatccagtttggcttggtgtaaggttttttgttcggtgaacattgcgtctaaatgagcatcattttttgagtcgataaagtatagcttcaaaataaattcgtctttgctggcaataatttcgctggttggggagtatcgccactcgtcaaaaaaggcaatcccatctgcagtgattgaatactgcttcttttttaattttgttccggcgatcaattcgacgtgggtgatccgatcagcctgttcgagtcgcttgagttcaggatagatttggctgtgttgggcttgccagaactcaccgatatcatcttcaaagacgcgttttaaatcataaccggttttgggagactgatttaacagcccgagaattaagtattggagaatgtttttttgggccatctgaaagtgcccctttctgtgaaatcaacttagattaagtatagcacaggccagtgttgaaaaatggttactttttataagtctttttaattgcatttcataaatagttagcgtaggctatttcaatcgggtaaaagtgcgttcaagcttaatcaacttttgagtattagtacggggaagcgaattagcgacgaagtcgatgatttgattcacggtgctaagcgcagaagtctgcgaattaaaagcacgttaaagaaaatgagtgcgtcaaaagtggttatcctgtgaggattagccaaattagcggtgtaaccgattgtttggctaatgtagctaaccggaacaggatgtttttgaaagcacggtaaaaaggagttttatcaatggcaaaaaaatcaaaagtggcaaaattagcaaaacaacgcgcattagtagcgaaatacgctgacttgcgcgcagaattaaaagcaaagggcgattacttagccctttctcaattacccaaggattctagcccagtgcgattgcggaaccgcgatgcaatcgatggtcgaccaagaagtttcatgcggcaatttggtatgagccgcatcaactttcgcgaattagcccataaaggccaaatcccaggcgtcaaaaaagcaagctggtaaaaaaatgagtgcgttaattcgcggttagcctttgagcacttgcctaatcagaaggataagcgccaagggcgattgtctggttgatgtagcaaggcgcagaaggttgcgaattaaaagcacgttaaagaaatagaagcgcgtttgaaacggtttgacttcgagcactagcctaaatctgtaaatgagcgacgtagtcgattgtttacggattggagctaagcacagaagtcagtttcaaaaagcgcgttaaagctagaaacccacaaaagaagaggtcgtcccacggcctcttttcttgtggggattgaatacgaccttaccggtggtcttgaatttagcgttagtgggttacgaagatgtgatcggcacggccagcgggttgtttagttttggctactacctcgcaatcagcgccttaacgtacggcatgagtctattgcatacgggatcgaatactcgattaccgttatacatgatcatgattgttggcgtgatggctctgagttatggattcgggattcgttcaaaagcagtttaaatgtaaaaagcgcgcagacaatcagttgtctgcgcgctttttatttaagcaagttgttgttgcaaaccagcgaggaaaatatcgaggcctagcatgaatttttccagtgagcgttgttgttggtgccgatgatgttcaaaagtttttaagaaagcattgtaatgattgtcagtcgcaatctgctgcattttaagcggtaactgtgcaagataagtgtctttatgttgtgagacgcgatgtttcatctcaagctcaccggtgatgtcagtgaagagaccggacatgaagtgatcgatggattcaatcgctaggcttgcttgttctggcgtgaaaccggcatccaaaaggatttgaattaagtggttgataagacctaggcgggccttagttgcagggacggtccgcatcatcaactcagcggcatagggctgtgctatgtaagtggtgtaaatggcgctaaaaatttggcgaatttggtctgtccattctaaggttgtgttacatggctcaatctcaatttgttgaataatgttatcagccatcgcctgtaggagggcttgtttgttttcgaaatgccagtaaaatgtggccgccccgatgtctaattgattggcaattttacgaattgaaagggcatcgacggtcccggatgcttgtaaaatttcaaacgcggcagtgatgatttgctcggcagagattgactgttttaccatattaatgaagctccttcactttttatgaaaagatgattgtaattcgttttaaaatttgataaagtagtaactcgaacactgttcgattatactgtacaggatttgtacaggagattcaactacagaaaaagagggatgctcatgtcgatacttaaacagcacttaaagccttattggggcgtgtttagtctttccattttagcgacggttatttctgttgcgtcttcactatggcaaccaaaactattacaagatgttttggaagggattatgaaaggcgatcaagataaggtacgtcaaattggaatttatttgattgtaattgccgtggttggtttaattgcgggcgtggtcaacaccattacgtcggcgatgacggcgcagggaatgactgccgatatgcgggaaactactttccggaagatacagactttctcatttgccaatattgaaaaattctcagttgggaatttatccgtgcgtttgaccaatgatatgacccaggttcaaaacgtcattatgatgacgctccaaacgatttttagaatcccgattttatttgtcggcagtttcatccttgcgatgaattcgattccgagtttatggtggattatcgtgctcttagtgatcgcggtcttcatcattacattcttatcaatgggttcgatggggaaacacttcggtgccatccaaaatttaatcgataagattaataacctcgctaaagaaaatttaatgggcacgcggattgtgaagtcttttgtccaagaagataacgaaatcagtcgcttctcaaaaacaagcaatcaattagaacaccatacgacaatcgtcgggatgcttttttctgtgatgattccagcgttcatgttggtggcgaacttagcggttgtcgcatcaatctatttcgttgggaacttagtcgatacggatccagaagcgattgcggcgattgcctcatttatgaattacttaatgcaaatcatgatgtcgatcatcatgggcggcatgatgatgatgatggcatctcgtggggcagtttcgttgaagcgactccaagaaattctttcaacagagcctgatatcgtttatccagatgtccctgatcaaaacttagcggggacgttggaattcgatcacgtcagcttccgttatccagaagacgatcgtaacacgttaacagatattaatttcaaaattaacgctggtgaaatgattgggattgtcggcgcaactggggccggtaagtcaacgatggcgcaattgattccgcgcttgttcgatccgactgaagggcagattaaaattggcggcgtgccaatcaaagatttaaacgaacataatttacacagcgccgtttcatttgtcctccaaaaagcgattttattctccggcacaatcgcacaaaacttgaagcacgggaaaaaagatgcggatgacgccgatatggaccgcgcaacggggattgcccaagccaaagagttcatcgaaaagcttgctgatcaatatgatgcaaccgtcgaagaacgcagtgcgaacttctctggtggtcaaaaacaacggctctcaatttcacggggggtaatcgggcaaccgaagattctgattttggatgatagtactagtgccttagatgcccggtctgaaaaattagttaaagaggcgttagaccgtgaattagctggcacaacaacactaattatcgcgcaaaagatttcatctgtggtcaacgcggatcggattttagtgttagatgaaggtcgtttagtcggtgttggtaaccatcatgaattacttgaaaccagtgatgtctatcgagaaatctttgaaacgcaaaaaggaaagcgaggataaccaatgcgagaatttaaccgagcaatgaagttctttttccattatctaaagcggtataaaccttcttttgcaatcatcctcgtgatgactgtgattgcgacttatcttcaggtgaaagcacccgaatatatcggggacgcgctcaatgagttagtcaaatatgcaacgaaatttcaaattttaaaagcccaacatttgccaaccagtggggcatctaaagacgccttcgtagaggtgattgtatcgttgattttattctacgtctttagttcagcagcgacgttggtatcaggcgcggttttctcacgcgtcaacgcgttatcaaccaaccggatgcggattgggttattcaataagctccaaaaaatgcagattaaatatttcgaccgtcattcagatggcgatattctcagccgctttacgagtgacttagataatatttacaatgcgatgaatcaagtgttgagccaacttgtatcaggcacggcgctcttaattggtttattgattatgatgtttagaaaagatgtgcagctcgcttgggtgacaattgcttccgtcccaatttcattcatccttgcttggatcatcattaataaagcgcaaaaatacgttaatgtgcaacaagatgaagtcgggaaactcaatggctacattaacgaaaaaatcacgggccaaaaagtgattattactaacagccttcaagaagaaacgattgatggcttcattgaacataatgaaaatgtccgcaaggcgactttaaaaggtcagatttattctgggatgatctttccgttgatgcaagggatgtcgttggtgaataccgcaattgtgatttcctatggtagctggttagcggtgaacggtgacattaaaaagtcgatcgctttgggtttagttgtaacattcgttcaatattcacaacaattctataaccagatcgcacaactttcatcgagttacagcatgattcaattggcaattaccggtgcccgccgagtgaatgaagtgtttgatgaagacgatgaagtgcgtccaaccgacggtgtgcaatttgagggcattgaacgctccgtgaccatggaacatgtcgactttagctatttaccaggtaagcaaattttgcatgatgtgaatatcgaagtggataagggccaaatgattgcgttggttggtccaactggttctgggaagacaaccgtcatgaacttgatgaatcggttctatgatgttgatcaaggcgcagtcaagattgatgacattgatatccgtgaaatggatttggatgcattacgctcgcacgtcggcatcgtgttgcaagaatccgtgcttttctcaggaacgattcgcgacaacattgtcttcgggaaacccgatgcaacagatgaagaagtggtggtagctgcccagcaagcccacattcatgacttcattatgacgttagatgatggttatcaaacggctgtcagtgaagaagataacatcttcagtaccggtcagaaacaattgatcagtatcgctcggacgattatcaccggtccagcgctcttaattttggatgaagcgacaagtaacgtcgatacggtgactgaaagtcatatccaaaaagcgatggacaacgtcatccaaggccgaaccagtttcgtgattgcccatcgtttaaagacgattctcaatgcggatcgcattatcgtcctcaaagacggtcgcatcatcgaagaaggcagtcaccaagaattactagacgaaaaaggcttctacgccgaactgtacaacaatcagtttgtatttgaatagagtgcgacagcgagcgtttatattttgaggactagcctagtcagtcaaatgaccaatttattggccatttaattcaaccggcaacttgcccagtgcgctgagcgtcaattgatgcgttgcccgcgaaatggcggtatagaggcggttgcggccgacagttggctcggtataataattgttagtcagatcgtacaacaaaacgttatcaaattctaaccctttagccagcgtcagcggtaaagtgaaggcgccggtttcggggagattcgtcgtttctgtggataagtggtggacatttttgaggccagttaactgctcgtcaaagtcaccagcaggcgtgatgatggctaaggtttggtcagttggtagttggtcaatctgagcttggatttgggtgaggtagtcgttaaaatcagtcgcacaaatcgtcgttggccgcttgccggctggttgaacggcatggacatctgttaaatcggtgaatagttgactaaataacgtcgtgattgcaccggatgagcggtaacttgtgcgcagtgccgcagtttgtagttgtggaaaaatggtgggtaattgttcgaattgtactttatgcggggtgatactttgatgctgatcaccgaaaaccgtgaactgtgctttggggaaaagttgtttaaaaagagataacgtgcttgcgtgatagtcctgcacttcatcgataaagacctgcttaacgtttgggaagacgtgatgcgttaaataagcataaatctgagctgcaataacagcatcaatcggtgtttgacgggcaattatttgatcaaaagcaagccattgataaccgcttagctgatcagctaagtcttggtaatcatgacgaatcattttgcgtgctagcggtgctagtggttcatcttcgcgaattaagcggtcgaataagcgctgttgctcggtttcagtgaggctttcaagtcgagttaaagcatctgctgattgggcttcatttgtgatgctttcctgtagacaacttgtgagttgttgctgagttgcttgtattcgtttatcaagcgggggatccaccggtgtttttaagaagaattggtagcttgttgcggcatcaatcgtcagcggtaaaccagggcttaaagattggaaatcgctcgcctgcaacgttaattgtgtgatggtcaaagtagctggttgatcagcgatggggagtgcggctagatcagaaggtaacaattgcgccaatagttgttgtagggttaagttgactggtgtttgttcacctaagtctggtaaaacttgggcgatatagtcttgaaataggcgattaagtgaaatcatcaggacttcgttcaatgcgagttctttgcgttgccgatagagtagataggcgatgcgttgaaaaatgaccgatgttttaccactgcccgcaatcccatcgatgagtaaatggtcagtcgtttgttgccgaataatcgcgttttgttccttttgaatcgtcgcggtaatggcgctcatttgcgttgttttggcttcttttaaagtggctaataacaagggatcttcgatggcaatctgcgtatcaaagaaatcgattagctgatcagcttgaatttggaactggcgccgtcggtcgagattgaccgcaatggcgcgaccgttagcttgataactggtggggccgaatgtttgctggtaataaacatcggcgataggtgaacgccaatcgtaaatcacaggatcgccggcttggtttgtgaagctagctgaaccaaggtaaaaatcttcggcgtctattccctcaggaaaagtcagcgtgatttttgcaaagtagggttgctctaacagccgtaaggtctcatcatgacgtgcaacgagcgaatcggttttcaggttgagcatatcgatttccttgttgatactttctaaagcagcgaatgtatcaagattatcagcgtatgaatcgaaattgagtttggcttcaccggtgatctgcgctttgatggtgttgccgtttttctggttttgcgattgggtatcattgatggccgtcaaagtggtggttaattgttgataaacagtggatagatgcgcttgttcttgattgaaatcagtcgtcattcaaacagcccctttacaaagttgttcccctagtttagcaagcacgttcaaaaaaggagtgcgtcatcaacgggtagcttctgagcatttgcctaacttagcgaattggcgctgcaagcaccgctttgctaagtgtagcaaagcacaggaagctgttgatgaaagcacgttcaaaaaaggagcactgactgataagtcggtgctcctttttgcgttagtctgcttttatgatggtttcaattagatcaaaaaatccagctgcatcaacgtcgtagacgagtttagccggacgtccgtttttagttaagaacgtgcgcccgccggcaattccgtttggaatgacatcacatacaatggcttttgttttaacgattgttggatcaagaaggtaacaagttgttaaaacgtcccataaataataagttgaattagttttgaaatggaccagttgaggaacaaaggcgtaacaggtgccgataaagtccatcatggcattggcacgtttgctagcccaacgttggcgaatcgccggcgttaagggaacattattcgtactttcgagcccgactaattcaatagggatttgtgtgtcgaagacagttttcactgcttcgggatcccagaaggcattccattcagcagtaccatcagaatcgggttcagcaacgttgccttgttcaagaaaagaaccgcccatccaaagaagtttagcgattttatattcgatgcttggattgatggcgagtgcgcgtgccaagtcagttaatgggccggtaaagagcaatgtgacgggttcggttgcttgattgagtttagtgattagatcgagatgtgcggcttcaggactcagaggcgtttgaacggtgccacgttcatttagcacgggaagtgcatcgactgagtaagcgtcagttcgccattcttttggaaaaggatggactgcgcgtgagtcagaagcggccacagctaaccgcgctgattgatctgaaaacgtatcaatgattttacgactcgcgctaacggctggttcgacatatgaatcagcgccaattacgccgacgccaagtagtttgattgtcggcatttgtaggagcagagttaatgaaatcaaatcatcaacaccgccatcgtgattaaaatagacttgtgtttgcatggttcgcctcctgattgttcgttagttatcaattaatattagcattatctatatttcttagcaacaaatacaatataaacgaacaatattttataaaatgaaataaatgtattgattttatgtcgataacgtgtttataataaattatcaaatttattgacggaggcttatttcatgaaaaaaagtttggtcgtacttttctcgacagtccttgtattaggtggcgtgttagccgggtgcgggagtcaaaagacagcatcaaagaaagcaacgcacacagccgctttagtcactgatggtggtgggattgatgataaatcttttaaccaatctgcctgggaaggtttggaaaaatggggtgctagtcatgatcttaaaaaaggggtcaatggttacaattacgcacaatcgagttctgatgcggactttttcccgaacattaataagttaatcaaggcaaaataccaaacaatttttgcgattggctataagttagataacgcggtcagccaatctgcaaagaataatccaaatgttaactttgcaatcatcgattcaaacgttaagaatcggaaaaacgtcgcgtccgtcaattttaaaacagaacaatcatcattcctagccggggttgccgctgcgaaaaccactaagacgaataaagtcggctttgtcggtggaattgatagtgccgtcgtgaaaacattcgaagctggttttaaacaaggggtgaaagccgttaacccagcaatcaccgttgatgtgaaatatgctggttcatttacgaaagccgatgtcggccaatcattggcaaccgcgatgtacaacaacggcgcggatgttatttatcacgctgctggtggcactggcgctggcgtctttaccgctgctaagaacatttctaagggtggtcaaaaagtctgggtgattggtgttgatcaagatcaaaaagccgatgggaaatatgatggtggcaacgtcacattagcatctgccgttaaacaagttggcacagcagtggaagatcttgctaaccaagctaagaatgataaattccctggtggcaaaaccgtcacatatgatttgaaagacaaaggcgttgccttagtgaacgacaatgcttcccctgaaacatggcaagcagtcaaagaatatcaacaaaaaattgaatcaggcaccattaaagttgctgcagaataacgactattgaatgctaaaggatggcagcagttatcagccatcctttttgtatgcttaatgaatggagcgtaaaaatggcaaaaactgtgatagaaatgcagcacattacaaaacggttcggcgcctttaccgccaatgatgatatttcattaaccttgcaacagggtgaaatccttgccttgcttggtgaaaatggtgcggggaaatcaaccttgatgggtgttttgaccggacaattaaagccgactgcggggcaattactggtgaacggacaagcagtgaccttaaatggccctcgacatgcaaaagccctcgggattgggatggtacaccaacatttcatgttaattccggcttttacggtcttagaaaacattatcctgggtgacgaaccaactaaacagggccggattgactatgcaacggcgcggcaaaaggtcacggctttagtcgataaataccaactggcgctcgaccttgatcgaaaaatcgctgatatttcggtcgggatgcaacagcgggttgagattatcaaggcgctttaccgagaagcaacgacattgatttttgatgaaccgactgcagctttgacaccgaatgaaattcaagccttgcttgccatttttgagaagttaaaggcggaagggaagtcgttgatttttatcacgcataaactaaaggaaattaaacaagttgctgatcggtgcgtcgtgattcgtgccggacgtgtgattgatacggtactagtcgcacaaacggatccgacaaaattagcggaaatgatggttggccgtccgcaacaagcccccacaccgaaaatggctaatcaaggcgctgtgatgctatcggtggaacatgtcgctgctcgtgttgctaaacgcactgttctggatgatctgggattgaccgtgcatgcgggagaaattgttggaattgctgggattgatggcaacgggcagagtgagttaattcaggttttaaccggacaattaaaaccgcagtctggaaaaattgaattagcaggtcagtcattattgaaacggacaccacgccaaattagtgaacaaggcttagggtgcattccagaagatcgccagaatatcggtttgattttgccactgtcgattgctgaaaatttagcgctgaaggattattaccatcaaccgtatagtcatctaggctggcttaattatcgggtgatcaatcaaacggcgcagaaactgattaaacgattcgacattcggacgcaatctgaacaaacgcttgccggagaactttcaggtggcaatcagcaaaaagtggtggttgcgcgcgaaatcgccaaacaaccaaaagtcttgattgctgccaatccgacccgcggtgttgatgtaggtgcgattgaatacattcatcagagcttgattgaacaacggaaccaaggctgtgggattttacttgttagttttgaattagatgaaattttaaagttagctgaccgagtacttgtaatgcacgccggtcaaattgttggtgaagttgatccacaaaccacaacgagtcagacgctcggattattaatggccgggcaacaaccagtaggagggcgagacgaatgaataaacaacaatcttcaggattaatcattgcaatcctatccgttgtggcgggactgttagtgggcggagttgtgatgttggtttttggatattcgcctattcaaaattacagtaacctctttaatggcgcattcggcgatatctattcgattggcgagacattacgcaatgcgactccgttaattttgacagcccttggcttttcaattgcgagcaaagccggctttttcaatattggtgggtcgggtcagctattagtgggctggtttggcgcgattgtctttgcactccactttaaaaatttaccggggattctcttgattcttggcgcgattttagcggggatgctgctcggtggcttttggtcttggttggccggttttttacgggcctactttggaaccagtgaagtgatcacaaccatcatgttgaactacatcgcattgtatttcgtcaattttgcgattaaacgttggttggcgccaaaaggcagcgactcatcggccaacattgtccctaaagcaagcttgcggaccccttttttggaacagattaccaatcactcaacgtttcactggggctttttcatcgcgttagtcttggtgattgtgatgtggtggtatttgaaacggtcgaagactggatttgaaattaaggcagttggattgaacgaacaagctgcacgttacgcggggatgaatacgaaacaaacgattatgtgggcaatgctattatctggactactagctgggttagcgggggctgtcgatggtctagggaattatcaaaatatttccgtttcaaatgccttaccagatatcggctttaatggaatggcggtcgcgttattagcgaatgggcatccaatcgggattatctttgcggcgattttattctctgctttacagattggtggcttaagcatttccgtctactcaacaactccgacagaaatcgtcaatatcgtgattgcatcgattatcttcttcgtgggtgtgcgcttcttatttgaacaattactcaatcaccgcttactgaaaaaacacgcgttgatgaaagagaggcttgaaaaataatgacaatcacaatgattttaatgacgatttgtgcgaccacgttagtttacgcggcgccattgatttttacagccttgggtggtgctttttcagagcatagcggtgtgattaatgttggtttagaagggattatgattgttggggctttcagcagtgccgtctttacccttcaatttagtacggtttttggcggattgacgccgtggattgccttattggttggtggactgtttggtgcactgttctccttattacatgctttagcgaccgtaacattgcgcgctaatcacattattagtgggacggtgttaaacctattggcgcctgcattgtgtgtcttcttaacccgtgtgctgtatagcggtaaggggcaaacgccggtgattaatcaaagcatcggtaacttcacattccccggcttggcccaaattccagtgattggccccattttatttacgaagacgtcgttagtggcttacgctgcggttttggtcggcattatcagttggtatgtgctgtataaaacgcgatttgggctgcgcttgcggtcagtcggtgaaaatccagccgcagccgatacactgggcatcaatgtgagtcgttaccggtatatcggggtcatgttgtctggtttgttaggcggcattggtggcgcggtgatggcgcagtcgattacgttaaacttcagcgcagcgacgatttcaggtcagggcttcatggcattggcggcgatgatttttggtaagtggcatccaattggcgcgacaggtgcatcgattttcttcggactcgcacaaagtttgccgattatcggcggctacatcccaatactggccggtgtgaatagtgtctggttccagattgcaccatacgcgattacgattattattctggtgattttcttgggcaaggccgtcgcaccagcagcggatggcgaaaattatattaagagtcattaaaagatcattcaaaaaggcgaacacaattgcttgtgttcgcctttttaggctaatcctcagcggataaccatttgcagtcgcacgctattctaagtagtcctcttttaattgtttgatttcttctggtttgagggccattgcctttgataggtagttttcgatgttgccgtattcttgattaatcgtgtcgcggacaagttctagattagcctgtgtaatgctcttagcgttcattgaagcgacctggctatcgttacttgaaattcgggttggggttgctgagctgagtcctaggacctcatttgagaggacatagtcggcaacgattgttttccagtcgacgccgagagcacttagaattaaaaaagttgcgacaccagtgcgatctttaccggctgagcaatggtaaaggactgcaccgtttgtatcgtgattatttaatagtacggtaaataaatcgcgataagctgcttgagcatgggagtcggtgaccaattgttggtacatccggtccatacttgatcgttcgggagtagcagcttcttttttaccaaaaagccgcattaggccttttttggctggctttttaggggtatcggcttggtcagtgaatggaaataccgaaagacgatggtaggttagttggttgtcatcaaatgggtcgggggcgaccttgatttcatgacgtgaacggaaatcgacatcgtaagcaacaccgtaatttaagagatcctcaatatcagttgcggttagcgcgttcaaactacctgaacgtaataatttgtgccatttaacggacttgccatcaaccgtttggtaaccgcctaattcgcgtaggttataacttcgtgttaaatctagaacccgttgttgttcttgcatgccaatccatcctttataatcagttatttctattgtataacgaagctgggtggtgtgcacccttattttaaatgttcgtgattcattcgtacacgatattgatgaaaatgaattttcaataagagtttattgacgtttgcagaaaaatctgctaatattttatcaaattttaaactggttatcgattaaagataatacgaacaatcgatgggtcggcggttaatttagttcacaaattggaggaagattatgtctgcatgggaatcaaagtttacaaaaaaagggtttacgttcgatgatgttttattaatacctgcggagagtcatgtactccccaacgaagtcgatttaggggtgcaacttgcaaagaatatcaagttaaacacaccaattatgagtgctagcatggataccgttacggaagcacccatggcaatcgctatggcgcgtcaaggtggtttaggcgtgattcataagaatatgagtattgaacgtcaagcagatgaagtcttgaaggttaaacgttcagaaaatggcgttattattgatccattttatttaacagcggataaacccgttagtgctgctgaagatttgatgcgtaaatatcgtattagtggtgtcccaatcgtttcaaatctcgatgatctaaaattagtcggtattattacgaaccgtgatttacgttttatctctgatttctctgctgaaatcggaaccgtgatgacgcacgaagcacttgtaaccgcacctgtcggcacttctttagaagaagctgaacaaatcctccaacaaaacagaattgaaaagttacctttagttggtgatgacggtcgcttagccggattaatcacaattaaggatattgaaaaagtgcaagaattcccgaatgcggctaaggatcaatatggtcgcttattagttgctgccgctgttggcgtcacaagcgatacttttgaacgggctgcagccttattgaaagcaggggctgatgcgatcattatcgatactgcgcatggtcattcagctggtgtgttacgtaagattagtgaaattcgcgaacgcttccctgaagcaaccttgattgctgggaatgtcgcaactgcagaaggcacaaaagccttgtatgatgctggggttgatgtcgttaaagtggggattggccctggttcaatctgtacaactcggattgtggctggtgtcggtgtaccacaattaacagccatctacgatgctgccagtgttgcccgcgaatatggcaaaaccatcattgctgatggtgggattaaatattctggggacatcgttaaagctcttgcagccggtggaaacgttgtgatgcttggtagtatgttagctgggactgacgaagcacctggcgaatttgaaatctatcaaggacgtcgtttcaaaacataccgtgggatgggcagcttggctgctatgtcgcatggttcatcagaccgttacttccaaagtggtgtgaatgaagccaacaagttagtcccagaaggcatcgaaggtcgtgtggctgccaaaggcgcactcggcgatgtaatttaccaattacttggtggcttacgttcagggatgggctacgttggtgctgctaatttacaggacctacaagataatgcacaatttgtccaaatctcaaatgctggtttgacagaatcacatccacatgatgtgcaaattaccaaagaagcacctaactattcagcacggtaatttaaatcatttctatcagggtttaagtcgagcgttttgcacgacttaaatcctttttttgtggttaaatgatggggaggatttaaagaattctttaaccctaagtagaagatagtttgttacaatgaaagcgaatcatgcaaaatgatgttaaattaaacgaggtaacgattatgaaaattctaattgtagacgatgataaagaaattgttgaattattaagtatttatgttaaaaacgaaggttacgaacccattcaagccttcacgggtaaagaagccctgactaaaattgccacgaatcccgatattgatttgatgatcttggatattatgatgccgaatatgagtggtatcgaagtcattaaggcggtccgtaaggattcacaagtgcccattattgtggtgtctgccaagacaactgatatggacaagattcaaggcctcctaaccggtgcagatgactacgtttcaaaaccattcaatccattagaagtgatggcgcgggtgaagtcattgttacggcggagccaacaacaagtggccaacgaagtgccggatgtcttagaagttggtccgcttatcattaagcgcgactcacatgaagtgacgacgattaataacaagcaaatccaactcaccgcacttgaatttgggattttatacttacttgccagtcaccccaaccgggtcttttcagcggacgatatttttgaacgggtctggaaacaagaaagtatcgtctctgccaagacggtcatggtccatgtaagtcatttgcgcgacaaaattgaggaagcaaccgatggtgaaaaagtgattgaaaccgtctggggtgttgggtataaggtagaagtttaatggctgactatcaaggagaaaagaacctgcaaaaagtggcactaaccgctaaggaaaagagcgaactctttgccgagggtatcatcacggttattttgttattactattaaatttatcaatcatggtgctgttacaacaggcgattgtgaataatccgcaactaagcggcggcgtatggatgattaaaaacgccattacaattggtccgaatgaatcgcatatttggagttggcaaaattggtttgtcatcttgatgggggttgccgatgtgttagtcgtctattggcggcttattcggcgttaccatcaaatgcagatgtggcacgtgattggtgagttgcattacattgccgatggtcatttggaccaccggattaatttgcgtgtcaaccgtgatttgcaacgcgtgatcgatagtgtgaacacgctggttgatagtactgtgcgttcaatggaagaagaacgcaagattgaaaagagtaaggacgaattgattaccaatgtcagtcatgatttgcggacgccgctgacttcaatcatcggatatcttggtttaattgaagataatcagtatcaaaccaaggaagaactaaccaaatatacgcataccgctttcgtgaaggcgcaacaaatgaaggtcttagtcgaggatttatttgaatacacgaaggtgcggcaaacatcgacccccattaccaagacaacgtttgatatggagcagatgttagatcaattagcggccagttttgagttagaagcgaataagaaggggatgcagattaatgtaacttgtaatcctgcaccactgatgatggaagccgatactgaaaagcttggtcgagtcttcaataatttaattgctaatgctttgaaatatggcaagggtggcaaacaaattacgttggcggctgagaaaatcggccaagaggcgattattaaagtgtcaaatgatggtcaacaaattccaagtgattcattgaaccaactctttgaccgcttttatcgcgttgaagcatcgcgttcacaagaaacaggtggcactggacttgggttagcaattacccaaagtattgtcgcgttacatggcggttatatttatgctgattcgacgccagaattaaccagctttgtgatacacttacctttgaagttaggtcggcggattgatcctcaaactgctggcgcaaaatcagttaaggagtaatgttgtgtttaaaaaattagtacaatatgtaatggtcgtattggtaattgcacccgtgggcggtcttttgagtgcccagactaccaaagtcgcagcggcaagtacgccggtgagtttgccgaccgcccctcaaatcgatgcgagtgcagcaattgcgctcgacccagcaactggacaagtcttatacgaacaaaatgcggatcaggcgttgccaatcgcttcgatgacaaagatgattacagcctacatcgtgttagcgcaaattaagcaaggtaagttaacgtgggaacaaacggtgaagcccgatgacctcatttatcaattgagtcaaaataaggatttaacgaatgtgcctctacaagcggacggacaatataccgtcaaggcacttttccaagccatgatggtcgcttcggcgaatgatgcagctatgatgctcgccaaccaagtggccggttcacaaaaggattttgtcgatttaatgcggcaaaaagtggcggattggggcattcaagacgcacaactttattcagtgtccggcttgaacaatgaattcctcggcgctgaagtttatccagacagtccggctgatgctgaaaatgaaatgagtgcggcagatgtcgcacttgtagcgcaaaagttgttggctgattatcctgaaattcttgaaacaaccaagcaagcgcattttacatttggcgcccaaacaagtgatgaaacggccatgtcaacgtggaacttaatgttacctggcgaaaataatgcaccgcaagactacgtggtcgatggtttaaaaactgggacaacggacaaagcaggcgattgttttaccggaactgcgacgaaagatgggcaacggattctaacagtggtgatgcatgccaatggtgaagatactggccggcggttcattgaaactaacaagttaatgcaatatgtcttcgatggttgggaacaaaaacaattagcacaagccaatcagagtctcgcaccttataagacagcgacggttaaatatggtcgccaaaagacagtgcaattgattacgaacaaagctatttcaatgtgggtgccaaaaggaaccacagcagccaacattgactggcattaccaagcagtcaaaggtggtgcaaaacgccaattggaagcacctattaaaaagaatgtgcaaattggtcaagtgatgccacaattgaacggtgtcactacgcggtatatcggacaagcgccacaatcacaattacgcactaaaacggcggaccccaaagccaatttatttgttttaatcggtgaagggatcaaagaatttttcacgaacctattttagttggaattgaaacgcgacacttaacggtggcgcgtttttttatggctacgattataagccgtttcaagcgcagcatgattaaatcgtgctataattaaaaccattcacaaggattttgaggaggacgaaaatggctttaacattagatgcatgtacgttaattctaaaagagcatcatttattgaaaagtgtggcgcttaatggtgacccgactttaaatatgaccggaatcgcgtatgattcacggcaggtaactgaggacacgctctttttctgtaaagggaattttcgtcccgtctatttaacaaatgcaaaagaattaggggccgtaacatatgttgccgaacaagcgattgttgaaggcaacgggatgaacgccttaatcgtcacgaacgtccaaaaagcgatggcggttttatcagcggctttttatgattacccacaagatgatttatttatcgtggcttacactgggaccaaaggcaagacaactgcggcctactttactcaatcgattttacaagcggcgacccgtcaaaaaacagcattattttcaacaattgatcgtgtcttagggcctaaaccagaggatcgcttcaaatcgaatttaacgacaccagaaagtttggatttattccgcgacatgcgcaaagcagttgaaaacgggatgacgcacttagtgatggaagtttcgtcacaggcgtataagaaaaaccgagtgtacggcttaacgttcgatgttggcttcttcctaaacatttcgcctgatcacgtcggaccaaatgaacatcctaatttcgaagattacttacactgcaaattacaattattggtcaactcacgacactgtgtgattaacgcgcaaacgcaatattttgcggatgtgtatgctgcagcaactacgacgactgctccggaatcaatttacttatttgccgaaacggattatcaacctacaattccggtggcggttgatttccgctttgaaaatctagaaacgggcttagcagaaagtcggtttaaagttaccgcggcttctgaacgagccattcaacttggtgtttctggtgattaccaactgcgtttaattggggatttcaatgaaagcaacgcgacagctgcagtgattggtgctggtttggcaggggcggatttaatcgcagctcaacaaggaattcgcgacttgcagattccaggacggatggaaaccttagccgttccaggacatggtcaagtatatgttgattacgcgcataattatgccagcatgaaggcgctcttgagcttcttgcaaaaggaatacaatcaaccacgcctactagttgttgtcggtagtcctggcgataaaggtgtttctagacgtgctgggtttgcacaggtccttaatgaatatgcagatcgggccattttgacgactgatgatccgggatttgaagatccagcagccattgccgctgaaattttggcagggattgaccaggataaggtgacaaccaccatcgaaattgatcgtgcaacagcgattgaacaggtgattacggaaagtaaaccgggcgaaattgttgtcttagcggctaaaggggccgatgcttatcagaaagtacgcggggtcgatacaccatacccaactgatatggtgattgccaagcaagtggctgctaagttaagctaatcagcgtgtttcttaaagatttttaaatcagatgtggatttaattgctattctgaggtgggtctcgtagaataaagatgaatcaataggagttggagggggtattatgaaaaagatggttacagttagtacagttttggtatcaggactactattattaggggcttgtggtcaaagtagtacggcaaatcaagatgctgatgccaagcaaagttcaaccacggctagtcttaaagcacgtgaaagtagcgttgcaaaacgcgaaagtgaactttcaagtagtgcaagccaattaaaagcgagctccaaagcggcgctggcatcttcaactgaagtagagtccccacaaggaagttcatcaactgcaagtgttgctgaatcatcatcaactgctacaacggcaagtagcagtagtcaatctgcgagccaatctagcagcagtgcaccaacaacgactaccacgacaccacaacaaacaactgccgtagatggcaaccaagcgattaaattggtggttcaacaagttggctcacaatttggtcaaaccgcatcgtatttgaataatggcttaatcacacgcggtgggcaacaaggctatctcattaatatttacgtaccaaacgaagatcaaccacgggcaggttattttgttgtccaagcaacaggtgcagtggaacaaatctggtaattaaagagtgtggcgtaagtcgggatgctccgaggattaacacagagcgtgaataattgtagtaattgtttgcgactcagggttaaccggaggagaatgacttacagaacacgtttaaagttcaataattcaaaaaaggggttagggcaaaagcaatctttgtcccaatccctttttaagtgttttcagaaaaatgattgacaattagtgagactcgtgtaaaatatttttagtaaaacgtaataattacgatttataaaagaggagaaaaagatgcgtaaaaaaggtttggaaatcatggcgggaatcttactgctaatgctattagtggctggttgtggtcagagtacgaaaaaggcgagtgggattcaagttgtatcgtcactcgatttttatggtgaggccgcacaagcggttttaggtaatcaaggtcacgtgacgtcgattatcaatagtcccagtttagatccacattcatacgaagcaacaaccaatgatgctaaactcgtggctaaagcggatgttgtgattcaaaacgggcttggttacgacagctggttaaacaaagtcgtcaagagtgcccaaccagatgaccaaactgtgttgacagtcagtcaattaatgaaacaatctaatggcgctaacgaacacttatggtatgatttaaagacgatgccaacattgactaagcggttagtgactgaatttagcaagcgcgatccgaaacataaggcaacgtatcagcaaaatggtgcggcgtatcttaaaaagttagcttcgttagacgcacaactccaacaactaaaggcgcaggccaaaggaaaacaagtggctgttagtgaacccgtttttgactatgcattggctgaaacgggttacaaagtcgctaaccaacactttgccaaagcaattgaagatgggaccgatccatcaccaaaagatattacaacgatgcgggatttaattaaaacccatcagattgcctttttagtgattaataagcaagaagaaagtcccattattaaacaaatgcacgaactagcggataaagaaggggtgccagttgtacaagtaactgaaacactacccgctaaaaaaacatatttaacatggatgcaacagcaatttgatgcagttagaaaggctcaggattcaaaatgacagaattagtgaatgcacaacatttagggcttgcctttagtaatcgacaagtactaaaagatctcagttttacgatcaaacgtggtagcatgacgagtttaatcggtccaaacggggttggcaaaacaactttggtgcgcctattaatcggtaatttacaaccgacagaaggacaactcgtttttaacccggataagcaaaagctaaacatcggttatgtgccacagtttagaaatttagaagctgaatatccgttgtccattcgtagttttgtgagtttgaatcaacttgatagccacttaccgtggaaatcgcgcaaagaacgccaagcgcttgatcaaattttagaacagacccatctaaccgcgttgcaaaagacgaccatggggaatgcttctggtggtgaaaagcaaaaagcgtatttagcccaagcattaatcagtaaaccagacttgttgattttagacgaatcgacagcgagtttggatattgaaactaaagaagaagtgatggccttggttgcagagttgaaccgggaacatggtttgacggttatttttgtgacccacgatttagaattggcccggaaatacacggatcaatacctatttttaaaacgaggtcaatatgaagccggaccaatgagtcagttggatcccaatttggaattagattaaagcggaggataagcgagtgttaacttttgattttatgcggcatgcctttgtcgccagtacttttatcgcaattacctgcggtttaatcggggtatttgttgttgcgcggaacatgtcatttctagcgcataccctatctgaaattggatttgccggagcctcatttggggttttcatgggaattgcaccattgaatgggatgttattgttcacgttactcagttcaatcacgattggtcagatgagtgccaaagaatcacggcgagaagcgtcgattagtgcgatttcaagtctgtttgtcggtttggggattctctttttatccctttcaaaccgaaatgctagttatgctaccaatattttatttggttcgattattggcattagcttagcagatgtttatcaattaatcatcttatctggggcaattatgattgggctgttgatcttttaccggtacttggtatttgattcatatgatccgattggcgctcaagcacaaggtttaaagaccaacttactatcgatttatttcttaattttattagccgtcagtgtcagcattgctgctcagattgtggggtcattactagtattcatcttagttacgattccggcgttcattgctaaatatttagcgaagagcgtacccgggatgttggcaatctcggttgccgcagcgttattaggggtttggctcggtttatggcttggttatctaacgaactggccagtgaccttcttcatcgccacgattgagtttggcttttactttattgcattgttatatcatcgacgaattagccgttaaaaaaacgtcctcaatcattgaggacgttttttcatgaggcttaatttaggttagcgagtagggcttcgagttgatccaggcgttcttcgaaaactgcaaaagcgcgttcgagatagtcggcactcgtcatatcgacgccggcttgttgcataatttcaattgggtaggcggagctcccagcttttaggtagtctaaatagtgattgagagcaccgggctgtttggtgctaataccgttagcgagagtcgttgcagcagcaaagccggttgcgtattggtaaacataatagttcatgtagaaatgtggaatccgagtccattcaagggcaatctgtggatcgttaacgacggcaggtccgtagtagcggctattaatgtccgcatattgttgtgacatgaactcggcagttagtggctgaccattggcagcggcagcatgcatcgcatgttcgaactcagcgaattgcgtttgacggaaaacagtgcctttaaaaccatccaaatagtagttcaatagataggcctggaccttaggatcagactgtgtttgcaataaatattccgttaagagattttcattggttgttgacgcaatttcggccacgaaaattggatagtcgccataaacataatcttgggtctgacgggtgaaggcgctgtggacactatgccccgtttcatggaccaatgtgtataagttgtttaaatcatcttgccagtttaataaaatgaagggattggtgtcataagcgccgccagaataggcgccactccgtttcccttggttttcacaaacatcgattaagcggtcatcaaaaatatgggcaacttgtttggcgtaatcgggtcctaggatcgacaatgcttctttggcagttgcttgcgcctgctcataagtgtaggttaatgcgggttttcctaaaagtggtgtgtagagatcaaacatgtgtaattcagataaattaagttgctttttgcgtaattcagtatagcgatgtaaaagtggtaagtgttggttcacttgatcaaccaaggttgtatagacggcttctggaattgctttgggtgctagcgctgcttggcgtgcactatcgtagtgatggacttgagctaagtaattatgacctttgatttcagtggcaagcgtcgtcgcaaatgtatttttgaattgaccataagttttgtaaagtgcttcgaaggctgcttggcggactgatcggttggctgattgcaaaagttggctgtagaccccgtctgaaagctgaaacgtttgtccgttttcgtcagtcacttctgggaattgtaaatccgagttgtctaagacgctgaaggtttgactagcagcactgaagatatctccggcagcagctaacaaggcttcttcttgcccagataagacatggtctcgactatcggtaatggtttgaatgaaatggctgtaaactgctaaattaggcgtcttggtaagccaatctgctaattgcccagccggaatagcaagaatcgcaggctctaaaaaggccgctgctgctgaaacttcggccgctaagctgtccacttgggcttgatagccttgataagttgcgttagcagtatcctgatcatttttcatgctagcataaacgtaaattgtttcgagctggcggaaagtggctaagatttgttcgattgtagcgactaattgatcagccgattcaaacggacgatcaagtgttttgagtgtgggtaattgcgttttaactttcttaaaggctacttcaaaagctgcatcatttttgaaaatcgtggttaagtcccatgtgagcttttctggaacagcattgcgggtggggagttgttgagttgacatatgaaccctccataattaagactaattgtttatattttagcataaaagcgcttaggaaagtgttgttcaacaattgaaggaattattaaaattgtgtaacttttcttaaaaggcgttgtttgaaatgataattccgctataatagcaacataacattattaatgccggtatgatacataatagaagggaaacacctatgcagaattctaaatttttcggatctcgagaagcaaactacaaaaaagttaaaaagcatcgcacgatgaaagttttgatactcattctaacgctagtcctcttcggtggcggcgcgtatgcattacgcatcagtaatcaagtgaagtctgcagcgaataaaatttataaaccaaatgcgactaaaaaagccgctaaaacgattaaacataaaaaaccattctctattttattactcggagtggatactggtgctgagggccgagttgataaaggaaattccgatacaatgattgtggcgacagtcaatccagataaagagcaggtcaagttggtcagcattcctcgggatacgctagcgcaattacaaggcgcagagaagttcgacatgcaaaaaatcaatgctgcctataatgttggtggctctgatatggcaatgtcgacggttgaaaagatgttcgatgtcccaattgattactatgtcacggttaacatggggggcttatcgaagattgttgacgctgtcggtggcgttgatgttgacgtaccatttacgttcgaatggaacgggagcgagtttactaagggcaagatgcatctgaaaggaaaagccgctttagactactcacgaatgcgttacgatgatccagaaggcgattatggccgtcaaaaacggcaaaaacaagttatcacgtcgatgattaattctgcagtctcgcttaaatctttgaccaactttgaatctatcttagactccttgtcagatagtgttgccactaacctcagttttgatgacatggtagcgattcaagaaaattatcgaaaggcagctaaatcaattgagtctgatgttttaactggacgtaatgctgatattgatggtagttcgtatcagattccaaccaatgaagaaatccaacgcgtttcagatgtcttgagaacgtcactgggattagagaaaacaacgattaacaacgcagaaaccaaacaaaacgatttgaataccaactttacaggtgaagaaaatcatcaagagtttacggtttattctgaaagtgtcatgaatggtgaaaagagtgctgcaacgacgacgcaaagtaactatggctactcgaacagtgcaacttatagtggtaacaacgattacagtaacaccaccaatacttggcaaatgcaacagtctacaaatcagtggaatgcgggctattaaaaatgaatggaaaagcggtcctttgcaaaaggggaccgctttttttgtggactaaattagttgcgtttaacaagtgattatttatgcaattagggggtgaacaatagtttacatttacaagggggaacggtattatttaaagcggtacgaaaaagacaaatgaaggatgtggcgtgtcgtgtatttgcttgtaaatgttgttggattactgatttttattggagtcggctttctgttctcaaagaaaaagaaagaaatcgattggcgctccgtcttaatcatgttagtgattaacttagtgcttgcttggtttttaacgagtttttcaatcgggcgggatattgttttaggtgcagcaaacggctttaactggttagtgcaagttgcctatactgggattgcttttgcactaccaagttgggtcaatgtgaaacaaatggatttcgttgctagcgtgttattaccaatcttgatgattatcccattattcgatatcttaacgtatatcggggtcttgccttgggtgattaaatggttaggccgtgggttagctaagattacgggacaaccaaagtttgaatcattctttgcagttgaaatgatgtttttaggtaataccgaagcattagctgtttcaagcttacaattgaaacaaatgaaagcagaacgaacattaacacttgcgatgatgtcaatgagctgtgtgacagcttccatcatcggcgcatatacacaaatgatgccgggccaatttattttaacggcgattccggtcaacattattaacgctattattgtcaccaatattttaaacccagtgaaagtcacacccgaagaagatacgattgctaaaatgggtgggagtggttccgcagctgttgaagcaaccgaaatggttgaaggcaaagtggaacgtgaaccattcttctcattcttaggtgattcaatcttaaatgctggtaaattagttctaattatcacggcaaacgtcatcgcctttgttgcgttggctgccttgatcgacaaggtgcttcaattagtgaacccttggattacccttgaacatttacttggaatcgtgatgttcccattcgcatggttaatgggacttgatgtgcaccacgcttttgaatttgcacaattcatggggacgaagttggtgaccaacgaattcgttgtcatgggtaaagttcaacattcaatcgggagcttcgcaccacattaccaagctgtcttaacggtcttcgtgacatcatttgccaacttctcaacagtcggcatgatcatcggcgccttcaaaggccttgtggaccgtgaaaagaacgacatgattgccaaaaacgtcggctacatgttgctatcaggaatcttagtatcacttctttcagcagcaacagtcggactatttgtatggtaatttaaagagtgcgcaggcagtcggttatcttctgaggattagcctaatcaggcggattaccgacaaagtcggtgatttgactgatgtagctaaccggaagaagatggctgtcaaagcacgtttagagtgcgtttgatgacggttaacaactgagcattaatacaaaattcccaataatccgggtttttaggattattgggaattttagattaagcggaaattgttgtcatcaaaagcacgtttagattgtgtcattaacgggttgtttttgagcatttgcctagtgttgtgaataatcagcgcagctgattgtttgcaatacgtagcaaaacgcagaaagcagttaatgaaagcacgtttcaattcaatcaatttacggcgccaacttaatcttggtgccgcattattgggctatggccaagcggtaaggcaacaggttttgatcctgtcatacgctagttcgaatccagctagctcaatccaactgcaaaacttgacggttaaagggctttgtgatatattttggacattataataaaatgtagccatcgataaagtacttggttttagcgatcaatcacagagagagtaaccccgttgaaagttacttattgatttcagttgacagcttttgaggcttggatgaatatcccgctagcagatagcgttatcaacagctgaaattaaaggtggtaccgtgcgcaaagcacccttgtcgaaagacgagggtgctttttttattttttataaaatgtagattcagagaggattggcaaatatgagaacaagaacaacatattgtggattagttggggaagaatttctcaaccaagaagtcgtattacatggttgggttcaaagccaacggaattttgggaacttaattttcgttgatttaagagatcgcgaaggcatcgttcaattggtgtttaatcaagacacagatgcagatattttccaagtagcaagtaaattaaagagtgaatatgtcgttgaagtccaaggaacagtgatggcgcgtgatgaagcggccattaatccagacatgaagacggggaaaatcgaagtgattgttaaagacttagtggtcttgaacaaagctgaaaccctcccatttgaaatttcagataacaatacggcttctgaagatttgaaattgaagtatcgttatttggatcttagaagaccagaaatgcaaaatgccattaaaacacgggctgcgattactcgtgcagttcacagctattatgataacaatggttatttaaatatcgaaacaccgaacttgacgagttcaacacctgaaggcgcacgcgattatttggtgccttcacgggtttatccaggtagtttctatgcattaccgcaatcaccacaactcttcaaacaattattgatgtcagccggctttgataagtactatcaaattgcccgttgttttagagacgaagatttacgtggggatcgccaaccagaatttacacaaatcgatgttgaaacaacgttcttatcagacgttgaaattcaaaccgaaacagaaggtttattgaaaaaagttatgaaagacgtcaagggcatcgatgtgcaaacaccattcccacgtttgaaatggcaagatgcaatggacaagtatggttcagataaaccggatgttcgttttgatatgcaaattcaagatattacagaaatcgtgcaagattctgacttcaagccattctctgaagctgttgaagcgggccaatatgtgcgcgcaatcgtcgttaataatgccgcccctaaatattcacggaaagcgttagacgaacaacaacaatacattgaacgttacggcgctaagtcattgttgtgggcgaaatacgctggtgataaattatcaggggcttctgctaaaggcttattaccttaccaagaagcgcttgttgaacgtttgaacttaatggatgatgatttaattttaatcgttgccggtaacttccacgtggtttgtgatagcttaggttacttacgaacacacttcgctaaagaaatggatatgattgataagagccaatttgcatttacatgggttgttgattggccattatttgaatatgatgaaggctttggcaaatggattgcagcccaccatccattcacgcgtccacgtgatgaagatattccattgttggatactgatccacataaggcacatgcaatttcatacgatatcatcttgaatggttatgaattaggtggcggttcactccgtatttttgatccagaagtccaagaaaaaatgttatctgttttaggggttgcccctgaagtggctcaagaacgtttcggccacttattaaatgccatgaaattcggtttcccaccatcaggcggcttagcaattggtttggatcgtttcgcaatgttgctcgctggtcgcgacaatattcgtgacgtgattgccttccctaaaaattcccgggccacagaaccaatgaccaatgcgcctagtgaagtgacaccggaacaattagaagaattaggtatcgaagtgaggcctcaaaagaaggactaaccagcatcaaatgaagtcaattaagtaaaggagaattgccatggaagaaatgtttacgattttaggcggcatggggacggcggcaaccgaaactttcgtacatctaatcgatgaattaacaccggctaagaaggatcaagattatctgaattacgtcgtgttcaaccacgctgaaattccagatcgcacagcctacatcctcgacaacagccaagaaaatccgttgcccgtgatgttaaaagatattcgccaaatgaatttgttagcgccgaagttcatggtaatgacctgtaacacagcccattacttctacgacgaattacaagctgccgcagatttcgacattatccacatgccacgggaaacggtcaaacacatgcaacaaacaattcccggcttgaagaaaatcggtgttctcagcacaaccggaacccgacaagccggtatctatcaaaaagcaattgctgcttttggtcttgaaagtgttgttcccgaccaaacattgcaagatgccacgatgagtttgatttatgatgacattaaggcgactgggacattcagccaggacaagtatcaaaaaattgtcgatacaatgttaaatgactatgattgtgacgcggttattttgggctgtaccgaattgagtgttgcacagtcggaatttccattgtatcccgacaaagtgattgatccgatgacagtggtcggccaaaatattgtcgacgggctatacaacaagtagcaattactaattaagttttaacaaagagcatcctgagctgacgtatattgaacggcagtctggtatactacgataaatattgatatagaaggtgacagcatgcaagcaaacggtaaaaacttcacccccattttattggggagcgattttaacgtttacgggatggcccgttcgttttatgagatgtatcatgaacctgttaaggcctacgcaagtcaggaattagcaccaactcggtttacaaaaatcgtcgatttagaattgattccaggcttcagtgaagaccctggattcattactgaaatgctaaaattaaaggaaatctatcgcgatagcgatggcccagtcattttgattggctgtggtgatggctatgcgagcttaatttcacaacataaagcggaattggaagatgtctttgtttgtccatatattgatcacgatttactagaaaagttgacttataaggaaaccttctatgaaatctgtgacaaatatgacttaccttatcccaagacgcacatcattaccaagcaaatggttgaagataatcaggtggaacaacctttccaatatccagtggcgttaaaaccggcggattctgtggaatggcttgatgtgcattttgaagggcgcaaaaaagctttcacgattaaaagtgaagctgaattccaagacatcatgcgaaaagtatatgaaaatggctaccaatcagacatgattttacaagacttcattcctggggatgacagtcggatgcacgtgatgaacatctatgttgaccaacaacatcacgtgaagatgatgtgtctgggccatccattattggaagatccagcacccgcagctattgggaattacgtggcgattttgccggaatacaacgcacaaatttatcaacaagtccaaaaattccttgaagatatcgagtttacgggttatgccaacctcgatatgaaatatgatgaacgcgataacacctacaagttattcgacatcaatttacggatgggccgcagtagtttctttgttaccttgaacggctataacttagcccaatgggtggtgcgcgattacgtgacaaacgacttgcaagatgaacctgttgtttgggcgaataaagatgaagacagtcccgcactttggttgggcgtttcagtggatgtctttaagaaatatgcccgcaataatgccgaaaaagacaaggcattggcactcatcaaacaaaaacgttacggcaccacttttgaatatagcaaagatatgaatctcaaacgctggctattgattaaatggatgttgcacaattaccgcaaaaatttcgcgaagttcttcaaagaaaataaggaataacgtcgcttaaaactttaaaaagcacatcatcgttgaacgatgatgtgcttttttagcagcattagaaaaaatcccgccgcagggttgcaggtttgtggtaaatgatgcaatatgaagttggagaatcgctgtggcatttatggtttgatttttgaatgagtgctttatttttgagacaaaaacgatataataaatcaaacaataaatttacaatgctagccgttattttgactgtcaattagcgttaaagtgcttttagatgcgattatgaatgtagcaagtaattgaaaaaggtggaaaaacgatgcactcattagatattgagcgattaaaagagatgtcaaactttgaagttgccgctttgttcttagaaaattcagaaaaaaatacaatgcataatgcgccaattaatgttggtcgtggggaccctaactggattaatacgcgggcgcgattagcttttaataagcttgtcgaatttggcgtcgaagaatctgctaagaaaattaacgaggctgatggagatatggcgggctacgttgataaagcagggattgcacaacggctgcatgcctaccttgatgccagtcataaaacagatcgatttatattagcctttttagattataccgaaaagcacatgggcctcaatcaggatgatttggttcacgaatttgtcgacggtgcgattggcaatcactatccagtaccttcgagaagtttaatcaatgtggaaaaaatcctaaataaataccttgaagtgtcactatataatggtgaaaaattagctaatcaaacggatgtcttcccaacagagggcggaacagccgcaatggtttatttgttcaaggaattgaagatcagccatatcttacggcctggcgacacgattgccatcaataccccaatctttaccccttatttgcaaatcccagaattaagtgaatataaattaaagcaattcgatgtgagttccgttgaagatgacaactggcaaatgatggacgccaagtttgaagaattgaaggacccgacaatcaaagccttttttgtggttaatccaacgaaccccacttcgcgggctttcagcaaacacgcgttagctaagattaaagaggtcgttgaagcaaacccagaaattatcatcattacggatgatgtttatgggacttttgtgaatgatttccaaacaatttactcaattgccccccgaaatacgatgttagtttattcgtattcaaaactttatggggcaactgggcatcgtttaggcttactagcagtgcaccaagataatgtttttgatgaaattattgctaagcgaacggctgaagaaccagcgattaaggcagcttttgaaaaacggtactcagttgtggcgcctaatccgcttgcgatgaaattcattgatcgaacagtggctgacagtcgtgaaatcgcgttgtaccacaccgcgggattatcaacaccacaacaaattttgatggcactatttagtttgaccagcttaattcacgaaggtgaaaaggatccatacatcgaagcttccaagaaaatggttgatgcgcgatacaacgctttttgggaatcgatgggcatggaatgtgatcactctaaagaaaacgctgaatattatgcggtatttaacatctatgattttgctgaaagaaagtatgggcatgaattccacgactatttcgaaaagcacgtgagctatcttgatttcgaagataaacttgcagctaaatacggcgttgttgtgatggatggggcaggaatggggactgatgatggctacttgcggatttcattagctaaccaacccgctgaaaattatgccattactgggaaccggattgcccaattactagcagaatactatacccaatttcaagcacattaaataaaaagtaggcgctgtgaggcattttttgcaagatagtctgatccggagcgcgcgaggtgctgaggcaataaacattgtctcagcacctctttttttattggcctgcattaataattgaacatttatcgagtctgtttgtagacgacttttaggaatcatgtataataagcttgagataaaatgatttataaaggagtttagcatggccgacttagtttatcagaatattatcgcggacttaaaaaaagcgatcaacgcagaatcatttcccagcatgaaattacccgatgaacggacgttgactgaacactatcaagtgagtcgtagctcggtcaaacgtgcgttaaacgttatgtctaatcaagggatcattttcaaaaaacggggttcaggaacctttattaatccactttatttaaagggtggctcgttttttaattacaatggctctaacctaggggttaccgacagttttaaagccggtaatcggacaccggggattaaattattagatttccaagtcatcaagccgagcgcggaattgcaacgagacttgttcctgaaaccagatgattttgtttacgaaatcaagcgtctccggttgtttgatgatgaaccattcatgattgaaacgggcttcattccgattaaggtaatgcccgaattgaccgaaaaaattgtgtcgagttcaatctttaactacttggaaaccgagaaaaatcaagaagtcacacgcgctttcctgtcaattttcgcggaaccatcaactgatgatgatcaagcacacttaaagttgaaaccgacggaaccagttggcatcatggaagggattttcttcttagacgatgggacaccgtttgaattttcaacgatgcgcctgcactaccaatacatgaaatataatacattcgttacggttagcggtcgcgaatagggccgctatttttagatttaaaaaattggtacgacccaatattaaaaatggttgacttttttaaaaagtttagtatgataagagagtagtcagaaacaacaaagttgcaaaagctgcgactggaacttaaagtaaagctattaggaacttttttaaaattaaaaaggggtgctattaaaatgacagattattcaagcaaagaataccttgctaaagttgacgcattttggcgggctgcaaattatatctcagttggtcaattatacttaaaagataacccactattgaaacgtcctttggaagcaaaagatgttaaggcaaaaccaattggtcactgggggacaatctcaggccaaaacttcctatatgctcatttaaaccgcgcaattaataaatataacttaaacatgttctacgttgaaggcccaggtcacggtggtcaagtgatggtctcaaactcatatttagatggtagctattcagaaatctatccagaaatttctcaagatgttgaagggatgaagaaattattcaaacaattctcattcccaggcggcgttgcttctcatgcggctcctgaaacacctggttcaatccatgaaggtggcgaacttggttattcattatcacacggtgttggtgcgattttagataacccagacgtgattgctgctgttgttgtgggtgatggggaagctgaaactggcccattagctgcatcatggttatcaagcacattcatcaatcctaagaatgatggtgctgtcttaccaatcttgaacttaaacggtttcaagatttctaacccaacaattctttcacgcaagagtgatgaagaattaacgaaatacttcgaaggcaatggttgggaaccaatctttgttgaaggcgacgaccctgaaaagatgcacccagcaactgctgctgcaatggatgaagccatcgaaaaaatccaagcaattcaaaagaatgcgcgtgaaaacggcgattcatctcgtccagtatggccaatgatcgtcttccgcgcacctaagggttggactggtcctaagacatgggatggcgtaccaatcgaaaattcattccgtgcgcaccaaattccagtgccaattgacagtgctgacatgcaacatgttgatgcattagtagattggatgaaatcataccgtccagaagaattgtttacagaagcaggtcaattaaaacctgaaatcgcagaaattgcacctaaaggcgatcaacggatggctgctaacccaatcaccaatggtgggattgatcctaaaccattacgcttaccagattaccgtgattatgctgtggataattcagaacacggtaaagtcgttgcgcaagacatgattgttttaggcgaatatgttcgtgatatcatcaaagacaacgatcaaaataaaaacttcagaatcttcggccctgatgaaacaatgtcaaaccgtttgaaccatatttttgaagcaacaaaccgtcaatggatggaatcaatcaaagaaccaaacgatcaatacatggcaacagaaggccgtgttcttgattcacaattatcagaacatcaagctgaaggttggttagaaggttatgtcctaactggtcgtcatggtttctttgcaagttacgaatcattcttgcgcgttgtggattcaatgttaacacaacacttcaagtggttacgtaaggctgatgaacaagcatggcgtaacaagtatccttcattgaacgtgattgccacatcaactgttttccaacaagatcacaatggttacacacatcaagatccaggtatcttaacacacttagctgaaaagaaacctaaattcattcgtgaatacttacctgctgatgctaacacgttgttagcaacaatggatactgtcttcaagagccaagaaaagatcaatttagtggttgcttcaaaacacccacgtcaacaatggttctcaattgacgaagcaacagtcttagttaagaatggtttgaagattattgactgggcaagtacagaccaagatgctgaaccagatgttgtgattgcagctgctgggacagaaccaacacttgaaagtttggctgcaatctcaatcttgcacaaacaatatcctgacatgaagattcgtttcattaacgttgttgatttattgaaacttcgttcacctaaagtggaccctcgtggtttaacagatgaagaattcgacatgtactttacaaaagacaaaccagtggtcttcgcattccatggtttcgaaggcttagtacgtgatatcttctttgaccgtcacaaccataaccttcatgttcatggctaccgtgaaaatggtgatattacaacaccattcgacatgcgtgtcttgaatcaaatggatcgtttcagtctatctaaagaagttgcagttgacgtacttggcgatcaagctggtcaattcgcacaatcaatggatgacatggttgctaaacacaatcaatacattcgcaatgaaggtactgatttaccagaagttgaagaatggcaatggacaccactccgttaatgcggtgagagtgcgtcactaacggtttgcttttaagcatttgcctaatcaggcggattgccggtaaagccggtgatgtgactgatgtagcaaggcgcagaaagcagttagtgtaagcacgtttaagtggaagagtgcgtttgaactggttatcttctgagcattaactggatttgacgaattgacgatgtaatcgtcgatttggcaaatttggttaagcgcaggaagatggttcaaaaagcacgtttaaatgatagaattctactatcagaagaagggtctgggacaaacatacttttgtcctagattctttttttgtggattagtggtctctgagcctttatttttaggcataataacggtaaactagtagacaagtataattttagaaagaggcgttttttttatggcaaaaaataaaatccgagtgcggtatgcgccaagtccaacaggtcatttgcacatcgggaatgctcgtacagcattatttaactatttatttgcacgtcacaacaaagggactttcgtgattcggattgaagataccgacacgaaaagaaacattgctgacggtgaaaacagtcagttagataatttgaagtggctaggtatggattgggatgaaggtccagataagcctggtgactttggtccttatcgtcaatcagaacgtcgcgaaatttacacgcctttaattgaagagttagtggctaagggattagcttacgaatcatacaaaacagaagatgaattaactgaagaacgggaagcccaaaaagcagctggcgaagcaccacgttacatctacgaatacgaaggtatgagtgatgatgaaattaaggctagccaagaagctgctaaagcaaaaggcttacaaccagttgttcgtttacgtcttcctaaggatcacgtttacaagtttgatgacattgttaaaggtgaaatcagctttgaatcagatcgtttaggtggcgactttgtcatcatgaaacgcgatgggatgccaacatataactttgccgttgtcgttgatgatcacttgatggaaatcacccatgtcttgcgtggggacgatcatatcgccaacacgccaaaacaattggctgtctacgaagcctttggttgggaaccaccagtctttggacacatgacattgatcatcaatactgaaacaggtaagaagttaagtaaacgtgatgaatcagtgcttcaatttatcgaacaataccgcgaattgggttacttaccagaagcgatgtttaactttatcgccctattaggttggtcaccagttggcgaaagcgaattgttcaatcgccaagaattcatcaaacaatttgatccaaaacgtttgagcaaatcaccagctagtttcgatcaaaagaaactcgaatgggtgaataaccaatacgttaaacaatcagatccaaacaaaatcatggatctttcgttagaaagcttgattaaagcgggtaaaatcgctgaaaatcctgatagcaaaacgatcgaatgggcccgtcatttgattgcgttataccaagatcaaatgagctacacagctcaaatcgttgaaatgtcagatgtcttctttgaagaacctgaacaattagacgccgaagcgcttgaagaattaaataacgaaacagcacccgttgttttgaaggaattcagcgaacgcttgaaagatttaacattattcacagcaccacggattatgcaaatcattaaaggcatccaaaaagatacgaagattaaaggccgtcaattgtacatgccaattcggattgcaacgacccgcgaaatgcatggtccatcattacctgattcaatcgaattgttaggtaaagaccgtgtcctagcccaccttgaaaagacattagcagaaattaaatagagtgcgtttaaaaaagcacgtttaagaatagagtgcgtttggttgcgttcagcaactgagcattaataaaaaattggtagttatccagaattcaggatgactaccaattttttagttaactggaaaagtcagttcgagaaagcacgtttaaacgttcaaaatagaacagcaaaaaagctgaggttgaagtatttcttcaacctcagcttttttatttttgtctagtccgatcaatttcagtccgaatggctttgaaactttgttctgtttgtgggccattattaacggcgaccatcataaacagactatcgacgatgctgatttgtgcaattaacgcgtgtagtgcttcggcgcggtaattggtttcttcggaaatggacaacagtgtcacatcacccaatttagcgagggttgaattgccaaaactggtgatgacaatcagtggaacgtgacgttcttttaagatgcgtgcaatttctaaagcatctttattttgaccactatgtgaaataatcagcgcacagtcttgttcggtgagttgggtggcctgcatcaattgtagatggtagtcttggctgtaaacagttggaatcgcagttcgtaaaaatttgtggtagccatcttgagcgacgattccagaagcgcccaagccaaataaacttaagcgcttggcctggttgatataatcaacggcttgccgtaattgcgcttcagtcagtagtgaacgagttgctttgagcgcattagtattggatgcgaaaattttatcggccatggtcagatagtcatcattattactaatttcatggaagagtggattatctgttgggattgcttgtttagcaagtaacgccattttgagtgcctggaagtttgcgaaggtcaacattttggcgaaacgggaaatagtggccgttgaaacaccacagtcagccgcaaattcttgaatcgttaaactttgattgaaatgttcagtttttaagatgtaatctgcgatttgtttgtatttttcacttaaattcgtgtagtacgcacggagtaaggaatcgatgttttgtgtcattgaagtgcccccttgttatcgatagtatagcataaaaagcaactaagaaaattattttctcaaaaagggttgattaaagaaaataatttacatataatgaagacattaataaaagtgacatgaaattgtggataaggggactagcaaagatgaaattagcaatgattggtttaggcaaaatggggattaacttggtcgctaacttacgacgtaatgggcacgaggttgtcgcctttgacttaaatgaagcagcggttcaagaagcaacccgcttaggtgcattacctgcaaaggatattgatgatgtggtggcacaattgccacaacctaaaattgtgtggagcatgttacctgctggtaagccaacacaagccacaatcgaaacgttaagtaccaaattgacagccggtgacattgtcattgatggtggtaattcatttttcgaagattctaaacaacacaatgcattgcttgccgcaaaagggattcatttcttcgatgtcggaacttctggtgggatgagcggtgctaacgcagacggaaacttcatgatcggcggtgacagcgcggaagtcttcaaacagattgaaccgatttttaaagatattgctcaaaaagatggctatctctataccgggaaggctggtagtggtcattatctcaaaatggtgcataatggaattgaatacggcatgatgcaatctatcgctgaaggattcgatgtgttatcacatggtgagtttgaatatgataacgaagcggttgctaaggtttggagtaatggttctgtgattcgcggctggttgatggaattagcggaatctgcttttgcaaaagaccctaacttagaaggcttaaaaggtatcatgcactcatcaggtgaaggaaaatggacattagatgaagccttgaaattacaagtcccaacaccggtcattggtttatcattgatgatgcggtatcgttcacttgaagatgatacattcactggtaaagttgtcgctgctttacgaaatgaattcggcggccatgcagttgataagaaataagtggtatcctagtaagtagtcagtaaacaccacataaacgaggtaattatgatgaaatatatgattggttcggatattggaacaacaagtacgaaagcggttttatatgatttaaaagggaatgttaaagcttacgcaaacgttggttatcctttatatcaaaccgtacccgatatggcagaagaagatccggatgaaatttttaatgcagtgtcagaagtattacgacaggtgatgcgcaagggcaacgttcaagccggcgaattacagggcgttagtttctcggctgcgatgcacagcttgattctgatggatgcaaatgatcaaccgctaactcgggcaattacttgggcggataatagagctgctaaagcaagtcaacaattgaaagaaaatgggttgggccaagccatttatcaacacactggcacaccaatccatccgatggcgccactttcaaaactgatttggctgaaagaagcgcaacctgaattgttcaaccaagctagtcaattcatcgatattaaaacgtatgtcttccaaaaacttttccatacgtatcaaatggattattcaatcgcttcagcaaccggcttgttcaacatttttaatttagattgggatcaacaagcccttgaagtggctggtgtcacacgccaacaactacctgaattagtcgaaccaacggattatgttaaagggattgatccgatctatggtgaattaaccggcattggtgctgaagtaccatttatctttggcgccagcgatggggttttatcaaaccttggggtaaatgcaattgatccaggcgtagtcgccgttactatcgggacaagcggtgccgtgcgagtggttgttgatcatccagtggttgatccaaacggtaaattattctgttacgccttaaccaaggataaatgggtggtcggtggaccagtcaataacgggggaattgtcttccgttgggtgcgcgatcaactttttgcacctgaaaaaatcaaggctgaacaaatgcatgtttcaacatacgatattttgacacaaattgcggcagaaattccggctggttcagatggactcttattccatccttacttgggtggcgaacgggcaccaatctgggatgcagatgcacgtggatcatacttcggtttgacgcggcaacatacgcgggcgcacatggtgcgtgcagcgcttgaaggcatcgtttataacttatacatggtgatgctgatgattgaaggtgtggcaggtaaaccaaagagtattcaggcaacgggtggcttctcccgttcagaattatggcgccaaatgttggcggatgtctttgaacaagacgtcacgattccagagagtttcgaaagctcatgtttaggtgctgctgtcttagggatgtatagtttaggcttagtggatgatctatcagctgtcaaagaaatggttggtgtgacgaatgtgcatcatccagaagaagccaactttgaagtttatcgcgaactattaccaatctggattcgattaacacgggaattaaatacggaatacggcgcaattgctgacttccaacgcaaacatatgcaagttaaagagtaacgaagtgaactgggtctgaaagcccagttacttttaacaatatcatgatagcgcaaacattattgaaaatagggaaaattatggcattagtagtcctattattgggcattatcttattactcgcccttattattcgatttaagatcaatacgtttatcgctttagttataacggcaatggccgttggggttggcctaggtatgccattaacggacattgcaaccagtgttcaaaacgggattggcggtcaacttggtgagctctcaattgtctttggctttggtgccatgatggggcggttagttgccgacgctggtggcgcgtttagaatcgcgcataccttaatcgatatgttcggtaaaaaagacttcaaattgcaattatgttggcttcgttcatcattgggattgccttattctttgaagttgggatggtcttgttagtaccaatcgttttcgcgattgcaatcgaagtaagtgtgtcaattttgtaccttggaattccgatggctgcagcactttctgtcacacatgggttcttgccaccccatccagcaccaacagcaattacctcagctttaggggcaaatgctggtcacgtattgttatatggggtcttaattgcgatcccttcagtgattattgccggtccattattcactaggattgcaaaacgcttagtaccagatgcgttcgcgcgccaaggtaatctgacggcacttgggcctcagaaaacctttaaattagacgaaacaccggggtttggaattagtgtcataacctcattattcccagtcattttgatggctgtcaccacgatttatcaaatggcctttaacggcgggaaattacctaaaaatccaacgatgctggattcaatcgtcggttttatcgggacaccagccattgcaatgaccatttcattgatggttgcgatgtatacgatgggttgggcgcgtcggattaaaaccctagcgattatgaagacgattgaagaagccgttaaatcaatcgcgatgtcactcctagtcattggtgggggtggtgcgtttaaacaaatcctcatcgacggtggggttggcgatagtgtcactaaattattcgcaaatgccaatttatcaccactattattaggttggttaatcgcagttgtcttacgggtggcattgggttcagcaactgttgcgtcattgacggcggcaggcttggtcttaccactaatgcaatcagccggtgtgaaccctgcactgatggtcctttcaattggagccggcagtttagcggcttcccacgtgaatgatgccgggttctggatgttcaaggaatactttgatttaagtgtcaaagaaacccttgcaacttggacagttttggaaacattgatttcgattgttgggttaattggcgttttactattaagtttagtcgtctaaataaaagttaaatgacgttggctgttaaagacagtcaacgtcatttttaatagcacttaaggtgggcaattatttgtaatcggttacttaaaaaaacgctgagaaacagcttttttttaatcttgttcagggacaacatcaaagagatatgatagaatgggtaaggattaatttgaacactggagacgatcagagttaggtcatcctaaaatcaaagtcattgaatcctaatagttgaacgactcaatcgaagagaaagaggtacttatatggataagaagcagcgagaagattcacaaaagggtgaacttaatcaacaaaagcatgagaaattcatacactatgctgatggcacgagtcttgaagaaattaataacacggttgcgattcccaagaacgctggtttttggcggacgttgatggcctttatgggacctggtgcgttagtggccgttggttatatggatccagggaactggatcacgtcaatcgccggtggtgcgcaatacgcatacaccttgatcagtgtgatcctagtatcaaacttaattgcgatgttattacaagcaatggcagcgcgtttaggaattgtgaccggaatggatttagcgcagatgacgcgggccaaaaccggtaaaaagatggggattttcctctggattgtcaccgaattagcaattatggcgaccgacatcgccgaaattattggttccgcaattgcgttagaactgattttcaacatcccattgctctggggtgtcttaattaccgcatttgacgtcttgctattattactattaatgaaacttggtttccggaagatcgaagcgattgtcgcaaccttggtggccgttattttattcgttttcttatacgaagtgattctagcgcaaccaaatatgggcgacgtaatgcgcggatttgtaccaagtacacggattgttaccaaccagaagatgctattcttggcattagggattgtcggggcaactgttatgccgcataatctctacttgcattcgtcaatcgcacaagcacgtcaatatgaccgtgacgattacgccgaaaagaagaaagcaatcaagtttacagtcattgattcaaacattcaattatcagtcgcatttatcgttaactgtttactcttagttttaggggcagcaatgttctttggaactaacagtgatttaggacgattcgttgacttattcaatgctttacaaaacaaagaaattgttgggagcattgctagcccaatgttgagtttactctttgccgttgctttattagcttctggtcaaaattcaaccatcacagggacactttcaggacaaatcgtcatggaaggtttcgttcgcatgaagattccattgtgggcacgacgggtgattacccgtgggttatcaatcttacctgttattattttcacggtttactaccatgggaacgaagcacaagttgaaaacctcttgatttactcacaagtcttcttgagtgttgcattgccagtctcgatgattccattgacaatgtttacgagtgatgaaaaaatcatgggcccattcgttaaccgcccttgggtgaaatatacggcatggtttgtcacaattgtgttgacgcttttaaatatctatttgattctacaaacaatcggcctagttggctaatgaataggtgctcgttaatccgtaaattgatatggattgacgagcgctttttttgttcggtatgctagactagagataaggtattattttggagggattttattgtttgaagtaacgagtgtgcatatcattattcgactgctactggcaaccttaattgctgggattatcggatctgatcgggaatataagaaccgtccagccggaatgcggacacacattctggtctgcattggtgcgtgtgtgattgcgatgattcagcaggaaatcgcagcgcaaaacgttcaatttgcattagcgcatagtgcgattagtaccactattcgttctgatcaagcgcggctgattgcacaagttgtcagtgggattggttttttaggagctggaacgattattgtcacccgccacaagattcaaggattgacgacggcggcctcactttgggctactgcgggattaggacttgcaattgggatgggctactatcaaattgcggtgatcagtgcggtctttgtcattttcgtgattgtcttcttgaaaaagattattcacatcaatacgttgaaaaaaatcgaaattaagtataagcataaattggaaaccaaggagtttattcagagctattttgaacaacatcagattcaaattcgcgatgtgaacttctcagtaacgcaaaacgaacgtgatacgatttacactaacgtctatcgcatcgaaattccccgggaaatgcaatatgcagaaattgtggaagatatctcgatgaataagaacatcatgacgattcgaatggtcagtgtctaaaagagtgcgcaagcaggcgtttatatttcgagtattaactggatttgtctgcaatcgccgatgcgacaagtttggttaagcacaggaatatgcctgctggagcacgtttaaaaaaagtgtgctgtctcaatcgggaaatacatttacgaaaaaagaagccccctgataaacttttttatcagggggcttctttttatttcagtctaattaaacgcaatttgtctgtctcttggtaagattaagttgagaataattgcggcaagcgcacaaatcgaaattggtgattcaagtaagtattggatcatttgaggcgttgctttcaccaatgattgtggcatgatgatgatggcgatacatagaatgattggaattccgatgatgtacatatcacgttcttgggtgtgtagtgtgcgaataacatttaacccgttgagcatgatagttgaacaaatgatggcgaaaatcccaccaataactggggctggaatcgctgataagaaggccgctaatttattaaagaagccgaagatgataaaccaaatcccggcagaaacgaatacttttttactagcaacaccggtgattgaaataatgccggcgttagttgcataccctgtaactggtgagccgcctaagagtgcagcgattaaacagctaattccttcaccgataatcccgtgattccattgtttcttactgatgggcgaatccgtaacggcactcattgcaaaccaagtcccggtcgtttcggtcattaaaacggcgtagataatgacgaaggtcatgattgctgtcatcgaaaagtgcataccatagtggaatgcggtgaaacttggcaagctaaaccaactcgcttcgttcacactttgccagtcaaatttaccaagcatggttgctaaaacagttccgcctaataaggcgatgatgatggaactaactttgaagagtttttgtaatttagggaagtagatacctagcgaaacacaaagaattagaatggcgacggtcacaacagccaggagtaagttctcattgatattgccctgtgctttgaaaatgttatcacctaaagcagatggcatcagtgaaagaccaacgatggtgatgattgtgccaccgacgacttgggggactaagctgttaataattttttggaagaggccggtgacgccgagaagaattaacagaattgaaccgacaattgaagcgccaatcaccgttgccatcccgccgtctttagcaccactagcaaagtaaatcccggcgattgccccaattggaacaaatgaagggccttgggaaacaggcattttcataaaaaatttggtttgaagaatcgtaccaatcccggcagcaaggaatgtcgcttgaattaagccggcttttgcatcaagacccatcgccaataaaccggcaatgataacggggggaacgtagacatccattgctaaaacgtgttgtagtcctaagaagccagcttcttgattcgaaatcggctcgtcaggaccgaccattaatttttgagattgttcattcataccagttgtgctccttttcgtggaccagtttaccttgaacgtagacggccttaatttggtgtttggtgtggcggaataaaagttgttcgagttgttcatctggtgtaagacttgcaaagcgtggtggcgcttgaacgatttggaaatcagcaagcaatcccgattcaatggcaccagcttgaatgccaagactagttgcaccaccgacggttgccatataaaaagcttgtttagcactgatccgactgttcgcaacaccgcgttggtcagccgcaatggtggcgtcaaccccgtcttgtcgaatttgggaggccgttacggcttgttgcaaattggcatataagctaggggtataaccaccggcgatatcactgccaagcccaattttaatgccttgattaagtaactcgtgtgcggggagaatcccgttaccaaaataggcatttgagatagggcagtgcgcaatcgctgcttgttcggttttaatgatactttggtcagtagttgtcagttgtgttgcatgtgctaataccgaatgttgattcaataatccgaatgattgcaacatctcagagtctgtatggccgtaacgttcgcgcacataatcgtgttcccagtcgctttcgctgcagtgtgtctgaacggtgatgtgttgggactgtgcaagttgaccgagttgctgaagtgtttcagttgtgcaactagggatgaagcggggggtaatgacgggttgaatgaacccattacgataggtatcttgaattgcttgaacaaaagtttgtgttttattaatggcttcttcaggagaagcatcacgataatagtctggtgtttgatctggattatccatcgcaacacttccgatgaaagcccgttgccctgcttgggaacaaatttctgcgagtcgtagattcgcagaattgtgaattgttccgaaatatagggcggttgttgtgccgttagcgagcatttcggtcactaagtcttgatacacaggtgtggcgaaatctaaatcggcgtagcgcgcttcaagaggaaaggtataatgattgagccaatcagctaaagggcgatcaagggcaattccagcttgtggccattgtggcgcatgattgtgtagatcgataaagcctggtaacaagaagtgtccgggagcgagtgtgattaagtggtcatgttggcgtgcagctgataatcgctcagagtattctgacgccgtttgatgaataatgtttgtgatttgaccattatcactgatttctatcagtgaatattcgtgaaatgaactataatttggtgaatttgcagaaaaataacttgcttttagtgtgattggcaaacttttaaacctctccttctagatggtgtgttgtaagtatatcacataccataatgcttttaaactttaaaatcgttcgccttttgattcatttctaagggatgctttcagaaaacgacacgtgagcaaaaaggtaccctaaaaaatagcagactgctagaatgaacttaaataagctagttgaaaggatgaatcacatgagtttagcagatgaatttgtagaacggcgttttattgtctttcaatgctataagtgccaacatccagcgatggaaatcacgacgaagacagcactagaagataattcagatggctctaccaagtttcaaattgaaacaacttgcccacggtgtcaagcaaccgatcaatttgttatcaataacggtcaagaaggggaaattagcgcgagtgtcaatagtggcaaagtcgctaaggttgccaacattaaataaggcaatcgacgttcgctaaaagtgaacgtctttttttgtggcgtaaattgtatataattatgaatacatgaataaaaaggctggaaacggttgatttattcaaatataattgacattatgccctttgaattgtatatttattctacttaatacaattataaaggacttattgaaatggcgaaatcaaaaaaaattaacgttcaaggtctcgtattgatgatttttgggtcaatcttcggctttgcgaataccacaattgctttctacttaatgggctatgccagcattatttggtatatcttagcggcaattttctttttcttaccaacttcattaatgtttgctgaatttggttcttctttgaaagaatcacgcgggggcatctattcttggttagaagcatccattggtaaaaaggcggctttcatcgggacgttcatctggttagcgtcatggattgtctggatggtgtcaacagctgctaaagtgtgggtgccgttttcaacgttcctccaaggttcagatcaaacagcaacctggcatttattagggatgaatggcactcaagtggtcggtgtcttaggaattctttggattttattattaactttcctatcaagtcgtggggttgataagattcaaaagtttgcgtcattcagtgggatggccgttgcctttttattcgccgcattcttagtgattagtgtggcgatttggtttaaaacgggttttcatttggcagaaccgattcatgggacgacgacctttgttaagagtccgatgagtagctatcaaacaccaattgggatgttatcatttgttgtcttctcaatctttgcttacgcggggatggaagccatgggcggtgttaccgatagtatggatcagcctgaaaagactttccctaaagggttaatgattgcgacagtcttcattacattaatctacgcggttgcaatctttatgtggggcatctcaacgaactggcaacaagtcttgagcgggaataaagctaacatgggcaatattacttatgttcttatgcaaaacttgggttatcaattcggccatgcctttgggatgacgacacccgttgcgatgacgattggaacaacctttgctcggattaccggtttaatcatgtttatcagttacttaggcgcatttgccgtcttgatttattcaccattaaagtcatttgtactcgggacacctaaagcactctggccgaacggctttgcagaagttaacaagcatggcatgcctgaaaaagcaatgtgggcgcaagcattattagtctgcattttaatcgcggttatttcatttggtggtaaagctgccggtgacttctataatgtcttgactttgatgtctaacgtttcaacatcgttgccatacctctttttagtgactgcctttccatatttcaaggcacgcaaagatttggaacggccttacgaattctttaaatcaccagttgctgttaaggcggtgacgattgtggtcgacttagtccttgtcttcggaattgcctttacgattattcaaccgatgttagaaggtcaatatttagatgccttctggatggtcattggtccgattgtctttacgattatggcccttgctttgtatcatcgctatcaacgaaaagcagtacatggctaaattttttaaaagcgttgaccgatttggtcaacgctttttttgatggcctaattaagggcttgtgaattttaaaagggattaattctcatttaattttaatgtacaaaggaaaatagttgcattttcagattggttccgttttagaactaatctgatttttaaagactaacataaagccccatctagcgattttttaatttttaaagaaagttggttacctaactatcacattagaataaaatgagaataaaagtggacggtgtgcaactttcacaataaacctgtatactttttagatatagttttcagaaaatgaaatcaaagggggattctatgactgtcaaattacaagtcaaaaatctaacaaaaatatttggtaagcgcgtgccgcgtgccaaagaattactgaaacaaggaaaatcaaaagcagcgattctaaaggaaacaggtgcgacaatcggtgtcgaccgggctaacttcgaagtagaatctggcgagatttttgtcattatgggactatctgggagtggtaaatcaacattggttcggatgatcaaccggttgattgagcctactgaaggtagtgtattaatcgatggcgaggatttaatgcagattgataagaaggcattacgtgaagtccggcgtaaaaagatgagcatggtattccaaaattttgggctctttccaaatcgaacgattcttgaaaatacagactatgggcttgaaattcaaggcattgataaggcgacacgggaacaaaaagcgaatgaagcactcgatttagttggtttaaatggttatggcgatcagtatccgacacaattatctggtgggatgcaacaacgggttggtttagcgcgtgcattagcgaatgatgctgagattttattaatggacgaagctttttctgcgcttgatccattgaatcgttctgacatgcaagaccaactactcgacttgcaagaaacgatgcacaaaacaattatctttattagtcatgatttaaatgaagcgctcaaaatcggcgaccacatcatgatcatgaaggatggggaaatcgttcaaaccgggacaccggaagatatcttgacacggcctgctgacgagtatgtagagaaattcatcgaaaacgttgatcgtagtaaagtttacacggccggcaacgttatgattcgcccaacgactgttaatattgaaaaagatggccctcgtttggccttaaaacgaatgcgtgaaaatgaagtttctaatgcttacgttgtcaacagtaaacgtgagttagttgggattattgatgcgcgtgatgtacttgagttagtccgcaaagaaagtcgtgatttgcaatcaatcgtgaatactgaagttccaacaaccgatgaagagacaccaattgctgatatcttagatgatatttcgcaaacgggcattccgtttgctgtcttaaatgataagcaacaattacgtgggattattattcgcggggccgtcttaggggcacttgcaggaaacgaggtgaaccattttgcttaatttaatgacgattgctaaattaccaattgccaattggatggatcactttgtcgattggctgacacaatttactggcttttttaatggtttaacgaattttattggcggaattatcaacgctttccaatgggtgtttgatttaatccccatctggttattcatcgtgattatcgctggcgtcacttatttagcgaatcgcgacaccaaaaaatggggtttaattatctttgaagtcctcggcctactcttgatttggaaccttgatttctggcgggatatgacgcaaacgttaacgttagtgttaacctcgagtctgatttccctcgtaattggggtgccacttggaatttggatggccaaaagcgatattgcccaggcaatatttaaacccatcttagatttcatgcagacaatgccggcatttgtttacttaattccagccgttgccttctttggtatcgggatggtcccgggcgttttcgcatcagtgatttttgccatgccaccaacggttcgtatgacaaaccttgggattcgccaagtgccaaccgaattgatcgaagcctctgattcatatggctcaactgaatggcaaaagttaattaaggttcaattaccattggcgaaatcgaccttaatggctggggttaaccaaagtatgatgttggccttatcaatggtcgtgattgcgtcaatgattggagcaatgggcttaggaacacgagtttactttgctgttggccggaatgatgctgggggcggttttgcagccggcttggcaatcgtaatcttagcgattattattgatcgtttaacccaagctttgaaccggcaacgtaaacattaaggagggattcagtgattaagaagaataaattaatagcttttttcaccttagtggggctcgtcacacttctaacggcctgcagttcgcaaactaagccgtacgctaccgatgagaaattaggcggtcaaattaattacacgattaccggaattgacgcgggtgctgggattatggcatccacacaaactgcaattaacaagtatcatttgaatgatcagaactggcagttgcaaaccagctcaactgcggcaatgaccagtacgttagacaaagcgattgcggataaacgcccaatcgtcattactggttggcaaccacattggatgtttactaaatatccaatcaagtttttaaaagaccccaaaaatgtttttggtcaagctgaacacattaatacggttgttcgtaaggggctaaagaaggatatgccagaagcatataccatcttagatcgattccattggacgccaaaggaaatgtcgaccgtaatgcttaaagtcaatgacggtgttgaacctgaaaaggcggcgcgcgattggattcaagacaatccagaaaaagttgctgagtggactaagggtgttaaaaaggttcatggcacgaaaattaagttaacctatgtggcttgggattcagaaatcgcgtcaactaacgtggtggctgaagttttacgtcaacaaggttatcaaccaacgattcaagctatggaaattcaaccgatgtgggcgtcagtcgcaactaaagcagccgatgcacaagtttccgcatggttaccgaagacctctggtttatactacaaggattacaaaggtcagattgaagacttaggtccgaacttagagggtgctaaggtcggtttagctgtaccgaagtatatgacgaatattaattcgattgaagatttgaaaacaaaatagaatcaaacagcgtatgcgatctgttcagatagaacatggttagatgatcaaatttcggctgttgaaagagtcggttagggcaaaagttacttttgttccaaccgactctttttttatttgttagacattctctgttagaataggactattgaatgttatcggaggcggaatagatgtctgttaaggcgtttttagattttatcgaattacgcactaaagttggtagcgtgattccctttatggctgggttcttttttacgttgtattatttccaccaaattgatccgatcaataccgtgttgtacttctgtgcattggtgttaattgatgtcttcacaacgggatggaataattacaacgactttcacctcgctaaaaatgaaacgctccagcaatcaaccagtgcattaggacgacaagatattgcccctaaggttgctttacgctggttgatcggctttataagtacggcaaccgttctggggctgattctggtctggcgcacaaatttaattgtgttagccatcagtgttctgttcatcttaatcgggattttatatacttacggcccattcccaatttcacgattaccactgggtgagttgttatcgagtctggtattagggttcggtaatttctttttgacggtgtatgtcaacgttccggcggatcagttggtcgatttgcgctttgatgggccgttaatgttattccaactgaattggctgaatgtgattttggtgtttgtggcgagtttaccaactgtcttcctgattgctaatttgatgttaatgaacaatatttgtgattacacagtcgatttagagaatgggcggcacacattaatcagttacattggtcaaaagcgcggcattcaactttatcaacttagtgcgtatagttgttacgtggtgattattgttgggattggcctgaaattatatccatggccagcagcgctagcttttgcgagtggcccaactttgttacgtaatgggtttgcattacagaagagtcaggaaaaacgcgttgtatttggtacagcggttcagaatctaattgtctttaacggtttttggctagtgggaatgttgattggcctctatctttaaatgaaaagtcactgcggtggcttttttatttcaaaaaaagtattgattgtatatacaattttgattataccgtgattattaaaacgcttacatgcggagatgagagttatgacatatgcaatgattgggacttggcgaatggcctttgaagggattcaaaaagcgatggctgatttaaaaaatggtgggcaaagtacggatgcaattgaaaccgctatcaaaaaagtggaagattaccccttctttaaatcggtcagttatggtggtttgccaaatgcgcaaggcttagtggagatggatgcggcattcatggatggcaacacttttgcaattggtgctgttgcaggaattagtgatgtgaagaacccaatctcagttgcgcgtcaattaagtgacaatcattttaatagtttcttggttggtgcgggagcgtcacaatatgcgatgttcaacggttttgaaagccgtaatatgttgaccgaacgcgcacacaaaatctggatgcaacgaattaaagaaattaacgaaaaaaatcttagcccatatgatggtcacgatacagttggcatggttagtttggatcaagctgccggtatggcagcggggacgtcaacttctggattatttatgaaaaaaccagggcggactggtgattctgcattatctggcagtggcttttacgtggatagcgaaatcggtggcgcaaccgctactgggttaggcgaagatttaatgaagggctgtctttcatatgagattgtgcgcctgatggggaccggtttatcaccacaagcagcgtgtgatcaagcagtctatccgtttgttgagaaattaaaaaaacgctacggcaaagctggcgagttttcgttggttgccttaaataatcaaggtgaatggggcgtggcgacgaacgttgagtttacgtttgcagctggcaatcaagatgcggcaccacaaatttttatggctaatccagggccaagtcaaacgacggtgatcgaacccatttcagcagaatggcttgaagcctacgcgaaacggattaaagcaccagttgaatagaggaagtggttggaatggttaagtatctatacgttgaaattgcagaagccttacgagatgacattcaaaaaggggtctatgggatccatcagaaattaccatcggaaacggatttagccaatcaattttcaacgacgcggctaacaattcgcaaagcaatcgatctattggttaaacaacatgtcgtggtacgcgatcgaaatcgtggcacctatgtacttgcaacacaaagtaaaatttcgagtggttcatctggtttagttggttttaccgaagcagccaaacagtttcaattggatgtcagcacgcgggtgttagatttacgccggacaatcgtttatccggactatgtggcctccaagttagatttagcaccacaggagccagtttggcagattgaacgcttgcgaatggcagacggtgaagcgatgacccacgaacaaatctatctgaaacaaaaaattctaccagaattaacggcccatgaggcacaagggtcactctaccgcttgattgagcaaacaatcccaatcgggtatgccaatcaagaactcgaagcagtcgtattggaaaaaggcttaagtgacttacttgagacctctccagggcaacccgcttttctagcccacacggttgcgtattcaatggacggttatccaattctttatgataactcgcattatcgtgctgataaatacacgttccataacatcttgcaacgtgaacattaaaaggagggttttaaatgaaagtaattgtcttgttggatcaaatccaagctggattaggtggtaaggaaaaaggggatacccctttaggtggaaaaaaattagcgatgggtgctgcggatacgctcgataaggcattaaaaaaaatggactctgaaattatcgggaccttttattgcggaactgattattatcaggcaaacaaagccgaagtgaatcggaaagttgcgaagatgagtgagaaaatgggtgcagacgttgtgattgcgggaccgacctatgattatcgggacttttcgacgatggcgtgtgaattagcagccactattcaaaaagaaacaacaattccggttgttgggctgaccgcgatcgaaaagaatgccgatttaattcaacagtatcaagatcaaataacgattgtgaagataccaaaaaagggtggtactggtctttcggattcaatcgaccacgcattgcagttatgcaaaatgaaggttgaaggcgctgattttactgattttattaaccaatattgttattaaaaggaggcaaaaccgatgcaaaagaaactcgaacagattttgatgccggttgcgattaaactggggaataatgttgtactccgatcattgcgagatggtttcttaatcattacgccattgattatcgtgacatcgattttcttactgattgggaattttccaattcctggttggactgaattttggagtgggattttagggccgcactggacagaatggtttagtgctgtttctaatttagtgtttagttttacagggttgcttgcttgttttgggatatcctatgcctatggtaaaaaccgagggttacaagcgattcataccagtgcaattgctattatttcattcttaattttgacaccgactgttgtcaccgttggtaaaaaatcaatcggtgccattcaaacaatgtatttgggacctaacgggattttcctagggatttttatcgcattagtcagtgttgaaatttaccgttttgcgattaaacgcaactggcgaattaagatgccagatggtgtgccacctgcagttagtgaatcattcgatgccttactaccggctggcttagtggtattagttttcttcttaattagaattggttttagcctttcgagtttcgaaacggcctacaatttcatctacacgttactgcaacaaccgttaaaaggtgccggcaactcattgccatctgtattgctttataacttcatcgcaatgttgctctggtgttttgggattaatggtccaactatcaccaacagtgtgtggtcaccaattttcttcgttctgacgcaagataacttaacagcattccagaatcatacgcagttaccacatattttcacccaacaatttattgacatcttcaccacatacggtggcggtgggagtaccctctcactcttaatcctcatgttaaccgtctgcaagtcaaaacgcgtcaaagaattgggtaagttggcaattgtccccggtattttcgggattaacgaaccgattatcttcggtttgccagtcgttttaaacccaattattgcaattccattcattatcgtaccggttttaaatacattgatttcagggattgtattccaactcggatgggtaccgtatacaaatggcgttatgttgccatggacaacaccaccgattatttctgggtggctttcaactgggagttggacagggtgagtcctccaattatttgaattagtgcttggaattttaatttactatccatttatcatgatgattgatcggcagtatttggcggaagaagccgaagcggctggcttagacgatgttgatattaattttgacgaaatttaatagaaagaagccattcttgtgaaaccgattagagcagattttaaggcattatttgaagcacatgctgatgagttcttagcggacttgcgggaagtgttacgcgtgccgagtgtgtgtggagcgcaaacgtttgaagcgccgtttggaattggtccgaaacgcgcattggaaacagtgttggcgattgctgatcgaatgggctttaggacggggcaagtcggcaattgtgttggctgggcagaatatggaccagacgaaacgcaagcgccaacttattttgggattcttggtcatttagatgtcgtggatgttgaagatgattggcattatccaccatttgaactgactcaggtagataatatgctgtatgggcgtggtgttttggataataagggaccatttttatcgacattatttgccctgtatctgattaagacgcaaaagataacatttaaacaacgcgtccgaattatttttggcactgatgaggaatctgggagtcaggatatgccaatttatttggcggaacattccgcaccatatgccgaattcacaccagattgtaaatttccagccgtctacggcgaacggggcttgttagatgtccagttagcgttaccgattacggacggctctgagcaacaaattacggcgattgaaggacggttcgctaaaagttatctgccagatcatgcacagctgattttggccgatggcacggttaaaacttatcacggcaaaaaggcacctagcaatgccccgaaatggcggataatgtgttaccgaagttagttgccgatgcaagtcaactcactggtcaaacgggtcaattttatcaatgggtagccgctaaaatcgggacgcagtcaactggggaaaacttggggattaattatcaagatgaagcatcaggagcattgcaacttgctttttatggggtatcgattgaagcccaacagttaagtatgcatctgacatgtcgttacccaatcccagtgacggaagatcagttgttaactgggattaaagctgccatgttgccggggatgacgttgacggttaaacggcgttatccatcgcaagttactgatccaacattgccatttattcaacaaccctctgcgatttatgcggcagatactggtttggatggcacaccggtcacaacaacgggcgtgacttatgcgcgcgcgttaccgaacatcatcgcgtttggcccatcatttccaggtcaaaaagggattgcccataaaggggatgaatggcttcaattcagtgactggcaaatgatgatgcagatttattatgatagcttgctcgcagtctgtactggaacataaaaaagcgtgtgccataagtcgggataccctgaggattagccggaaggggatgacttataagaacacgtttagacgattaaagttctaatatcaaaaaaggggctgagacaaaatttacttttgtctcagccccttttactgtttagcgacttgctaatgcgcccattggatcccatggtgcgagaacggttgggtgatcgtattcttctgtttcaatgcgtttcatttcatccgttaagaagcgtttgttgatcacgatttgataaacaaattcgtcaaaccaactatcactcatgacgaagtaacctttcgtcccaactttgtcaccccatgagttttcaaccttccatttggttggttgaccatcgacgaggtcgacaccggtgatgaccatcgcatgggtcatgagactttcaccgtaatcaaggcgttcgcctttagaaattgaaagatccatgccgagcatggcatctttttgataaatttcagtgtccatgatgccgagtttgcgatcagatgattggcctacatcgctaccgaaccaaacggattcacctgcttgtagttgtttaatcgcgagttgtttgaaggtgtcgatgtcgaggtttaaatgccgcacttcacggccaccgaccacattgcccaacatttcaacgctgtataagtggttgtatggtttgtcggcagttggtgagttaatcaatgaaacgtaattttcgaggtcccagccaacgtatttttgatagaacgtttgcggtgtgaggcctttttcgatgtgatagttgtgatcatcatcgcggtattcaaagtcgaattcaacgggtggttcgcccaatgcataaacgagcatccggtaaacttcggttaacatcgcgtcttttttagcttggatgtcggcttcgctaacaccgtcggctactaattggcgtaatgtaacggcatctttacggagtttaaggttcaaaacgccgttgagttcgcctgatttttcactattatatgtttcgggcatgactgacttaggtacaatcccgtatttttcgatgagtgcgcagagcatgtcccattggccgccatcttgttggggcgttgtcattaagaagtcgactttgcggtcgccaattggttggctggcagtcttcaagacgttttcgtagaagtagtttgatttttcgaatttgtcccagaagttggtgtagttttgggacaattcgaaatccttaattttgaattggtcttggaggctgtggcgcattgtatttaacgcggcgaacatccagcaacgaccagattgcttttgattggaaacggcaccggtatctaagtcgattgaaaaaacgggggccattttggcttttgaatcggtattagcactcgtggctaaaaagccgttgttcataatggcatttttaattgtgttggattgtggtgttgccttgaaatcggctttgaattgttgaatatcttttgctgtaatgggttgaaccatgtggaaaacctcctctaaaatttggtgggttaaattaaattacccggtttgaatggcattatttttttgaaacgtgctttcatcaacaacttcttccgccttacctcacttgccaaatcggcgactgcattgccaattcgtcaagtgctgtaagtgctcagaagtaacccattgatggcgcactctgatttgaaacgtgctccgtaagccatatccttccggttaaccctgaacgtcaaacgattgctggcgcaatccttcgccgttctgtgttaatcctcaggataaactcggcttactacgcactctattgcagtgcgtcccatgggtctagcttaattggggtttttgtgagtgcggcttgttcttcttttgtaaggtacgcttttttgacaattacctcgtaaacgtagtcgtcaaaccaagcgtcgctcatactgaagtaaccttttgtaccgactttggcactccatgtgttttcgactttccatttcgttggttggtcgtttacgaggtcgacaccggtgagggtcatcgcgtgggaaacaacgccttgtcggtagtcaagtcgttggtcttttggcatcgtcaaatcgaaaccaaagagtccagaatagtcgtaaaggttgcgatcaagccagcctttttgtcggtccatatccgcgagcacgtcattgccaaaccaaattgtttcaccgttttgtaaggattggatagccagtgcttttaaacgttcagggggtaagtttaagaggcgcattgggtgaccttcgactaccgtgttttgcgattctaaactgtagagttggttgtattgtttacttgtttgggggctgctgacaacggtgatgtagtcgtcaaagttgcgattgagatatttttgatagaaactttgcggggttaaaccgcggtcttcatggtaattttggtcgtcatcgcgataggtgaagtcaaacgtttcgactggttcgccgaatgcgtaaacacatagccgatagatttcacttaagaaaccagtccgcgtttcactgatggttgtttcgctagcgttgtcagcaacaagttgccgtaattgaatcgcatctttgcgcagtttcaaattaagagtgctgttgaattcagtggttaagtcactgttataagtttcgggcatgaccgacttgggcacagcaccgtatttttgaatcagtgccactgcgttgtcccattggccaccgtcaaaatcgggaccagcgagggtgaaggcgacttcgcgatccgtaatcggcttgtcggcagttgctaaaatcttttcataaaagaggttcgccttttcgatgcgatcccagaaagatagataattttgggagagttcgaaattcttaacgtgatatttctgttcgaaatcgtggcgtaatgtatttagagtggcaaataaccagcaccgcccactctttttttgaaagctgacatcaccagtggggaggtcgattgagtaggttggatcaagggtgacggcagcatcggggcgttgactaacggcgttaatgccattcgtcatcacagcatttttgagcgtcgttgcttgtggcacgccagctaaagcggtccgcatcttgattaaattattatgtgtaatttcttgggtcatctaatcactccttaatttttgaattagtttaattctagttgattagatgggagatgtaaaccgaataacggggataaagctaaaagaatggtgattgataaatgtgaaagaaaacgatttatatgagagcacgggacacaaaaaaacgaaccgctgagggttcgtttggaaacgtgctttttaaagctgacgcttgcgcttagctacgtattgcaaacgaccgattttgtcggtcatttaaaacactgtgctagtgcacagtgtcaaatctcctttaaacgcacgctttattttgctgttaaaatcttcacgccatcaggtgcgccaaccacgacttggtcgacgatgtctaggaatagaccatgttcaacaacgccgacttgttcactgagccatgatgccagtaggtggggatgttggacttggttgaggtgtaaatcgatgacgtagtttttagaatcagttaagacgtgttggccgtctgcagtcatccggaattctggatttaagccttctttagccattttgttgaacacttgttggctgccaaatggaatcacttcaactggtagtgggaagcgaccgattgtatcgaccactttttcttgatcaacaatccaaatgttgcgggttgaagtagttgcgactaatttttcgaataagtgcgcagcaccgccgcctttaatcccttggaagttggcatcgacttcatcggcaccatcgatggttaaatcaatgtggtcgacatggttgagtgctttgaccggaatcccaagtgatttggcttgttcttcagtacgaattgaggtgcagacacatgttaagttgaggtgttctgcttgtacccgttttgcgagggcttccaccatgtaaactactgttgaacctgttccaagtcctaaaatcatgttatcttcgacaaaatccactgagcgttcagctgccatctttttcattgcattcttatccatcaagacaccccttttgtattaataaatctattatacgaaaaaaacgctttaattgggcgctttttgttaaatttttaattaaatcagtcttaggcattattcacagcctccgcggtttcatggtatgatacagtggtacaaaaagaacccaaatgggcgataatattaggagttttaggaatgaaaaaacgcggctttgaaattgtgaccaaataccaagaggcgggattgagtttaccggtgcgttcaacagcgcattcggcgggctacgactttgcttgtgcggaggacttcgtgttgccatcaatctggcattacaactttgtgcgtttgttccgaatgattcgaaatggcaaaccgttagtggatgacgattttgaacgtgcatcaaaaacgttgaaaccctttctagtaccgaccgggattaaggcttacatgcaagacgacgaatatttaatgatcgccaatcgttcaagcaacccactcaaaaaagggttaattttacccaacggcgtcggcattatcgatgcggattactacggcaatgatgccaacgaaggtgaaatttttatccaaatggttaacttcagtccgcgggatgttatcttgaaaaaaggtgaacgaattggacaaggcatcttcatgccatatttagtcgcagatgatgaagcgacggtaaccaccaaacgaacgggtgggtttggctcatctggtcgctaaacgttaatcgctaggtcgccgaaaattcacaaacttatgttaaaataaaactaatctcgataatgaaggagaatctttgtggctaaaattaagactcagtttgtttgccaaaattgtggctatagttccccgagattcttaggtcggtgcccgaattgtggcgcttggaaccaaatggtcgaagaacgtgaacaacctgcagctagcgcgaaatcaagttttacgatttcagggcgggcaactgaaccagaacaaatcagcaccgttaatattcaaaaggaaccgcgtattaaaactgaattaaacgaactcaaccgcgtgcttggcggtggagtggtaccgggctcattgattctaattggtggggatcctgggattgggaaatcaacgttactcctacaagtttccggacaacttgaaaaggttggtaagattctttatgtttctggtgaagaaagtgcatcccagattaagatgcgggctaaccggcttgatgtgaatggcgatcaactttacttatatcctgaaacggatatgggcaatattcggcatcagattgaaacaatgaaacccgactttgtggtgattgattcaattcaaacgatgagcgaaccagaagtgacttccgcagtcggtagtgtttcacaagtgcgtcaagtcaccgctgaattgatgcgcattgcgaagacgaaccagattacgatttttgtggttgggcatgtcactaaagagggcgctattgccggtcctaagattttggagcacatggtagatactgtgttgtactttgaaggggatacgcatcatacttaccgcattcttcgctcggttaagaaccggtttggttcaaccaatgagattgggattttcgaaatgcgtgaagccggcttaaaagaagtcgcgaacccatccgagattttcctagaagaacgtttggcaggggcgacaggttcagccgtggttgtttcgatggaaggcacgcgacccatcttggtcgagttacagaccctaattaccccaacactattcgggaatgcaaagcgcacgtcttcagggttagatcataatcgagtctccttgattatggcggtgcttgaaaagcgtgctagtctcatgttatcgaaccaagatgcgtatttaaaagcaactggcggtgttaaattagatgaacctgcgattgatttggcgatggctgtttcgattgcatcaagctatcgggataaagaaattccaccaactgattgtttcgtcggtgaaatcggtctgactggtgaaattcgccgggtcaaccggattgaacaacgcgtcattgaagctgctaaattaggctttaaacgtatttatgtaccaaagaataacttacaagggtgggacgcaccgacggatattcaagtgattggtgtgaccacgattgcagaaactttaaagaaagtattcaactaggcataagttggagcgagaggaggttgaacgatgcaacaaaaacgatttactaaaaaaagaatattaggaattgtgttcattatcttaggaggtgcgcttggaattacggcgttcccagtattttggccattagttcatttggaagacatgatgtatctcaataacggtattactaacgtcattttaggggccattattttctatctattattcttggcgctggcaacaccaatgttgagagctatgcaccggcttgaaaaagccttaacgaaacaatcacctagttttattttatttgggagtgttttttcactaattggattgttattagcaaacgttgtttcgattccgctataccggatgcccatttttgcattaaatacagttgtacccattttattgatgattgctttagggtatctcggctttcgaattgggacaacgcgaatggaagaatggcgccgtttgatccaacctaagaaacgcaatgctgatgtattagaacgtaaagtcggcgataatttccgtaagtataagattctagatacaagtgtgattattgacggccgaataaaagaaattgctaagacgggctttatcgaaggcacattgatggtgccaaactttgtcttacatgaactacaattaatttcagattccgctgataatttgaagcgggcacgtgggcgccgtggactggatatcttaaacgatattcaaaaagacgatagcttatctgttgaaatgtacgacggtgatttcgaggatttaacggaagtcgatagtaaactcgttaaattggcaaaattacttgatgggattgtcgtgacgaatgattataacttgaacaaggtctgtgaatttcaaaacgtaccggtcttcaatatcaatcaactcgccaatacgttgaagcctgcagttttacctggagaagcgatgaccgtgacggtggtgaaagccggaacagaacggcaacaaggggttgcctatcttgatgatggcacgatgatcgttgttgaagatggccaacattacttaaataaaccgctagaagtgattgtgacaagtgcgcttcaaaccgctgcggggcggatgatttttgctagaccagcgcatcaacaaaaaggcttgaaagaaaaatagccacgcagaacactttacacggtcgtcaataatctgtatcatggagaccaactaaaccgttaaaattgatgaagagaataagtagatgatgccaattgttaagagagctttcgaattgctggaagaaagccgattgccccatcgaaatgcacctctgaaatgccaagtgactttgtgacttagccgggacaccgttacctgttcaaggcatttttgcaaagaaaagtggaaccacgctcaatcggcgtcttttgttaaccaacaaaggacgctttttatttggaagagtgcgtttgaaacggtttgacttcgagcatttgcctaataccgtgagggagcgccaccggcgatcgtttgcggtatggagcaaagcacagaagtcagtttcaaaaagcacgtttagaagaagagtgcgacagcagatggttatattttgagcattaactggatttgacgaattggcgatgcaatcgccaattgggcaaatttggttaagcgcagaaataagcttgcaagagcacgtttaagaaaggaagattcgatgttaaccgtttataataccctcacgcgtcaaaaagaagtcttcaaaccgattcaagcagaccgcgttaaaatgtatgtctgtggaccaactgtgtataactatattcatattggtaatgcgcgcagtgcgattgcctttgatacgattcgccgctatctcgaataccgtggctatcaagtcgattatgtctcaaattttaccgatgttgacgacaagatgattaaggctgcgaatgcggaacaaatcacggttccggaattagctgaacgctatatcaccgcttttaaagaagacacccaagcacttaatattgaaacagcgacactcaatccgcgggcgacagaaaacattccagaaattatcgcgttcattcaagacttaattgctaaagattatgcctatgccgttgatggcgatgtttactatcgtgctcgtaaatttaaggactatggccatctagctggtcaagatatcgatcagctcgaacaaggggccagcgaacatacagcaaccgaagaaaccctacgtaaggaagatccaatcgactttgccctttggaagtcagaaaaagggaccgatattgcttgggattcaccttggggtaaggggcgaccaggctggcatatcgaatgttcagtcatgtcgaccaaatatttaggcgacacgattgatattcatggcggtggccaagatttagagttcccacatcatgaaaatgaaattgctcaaagtgaagcgaagactggtaaacatttcgtcaactattggttgcacaatggctttgtgacagtcggggatgatgatcaaaaaatgagtaagtctcttggcaacttcgtgacggtgcatgatttgattcaagaagttaatccacaagcattacgtttcttgatgagtagcacgcaatatcgccgaccaattcgctacagtgaatcattattagctgaagcgcaaacgaacctggatcgtttaaaaacgaccctcgataacttagcgttccgccaagcgactgctgaagcgggcgcagacgcagacattgccgcacaagcggcaagcttggaagacgcctttgtgacagcgatggatgatgattttaacgtgcaaaacgggttaacagaattgtatgaactcgctaagcttagtaatcaatacctggaacgggctaccgtccaagctggtacgttagtggatttaactgcccgtctaacgcgcttgttagccatttttggtgttgagtttaaggcggcccaactgttggacgcagaggtcgaaagcttgattgaagaacgcaaagctgcacgggcagcaaaggattttgcccgcagtgatgcgattcgcgatcaattgaaagaacaagggattattttggaagatacaccacaaggaatgagatggagacgcgcatgaaaaatgctttacaactaaacgggattgcgttggcatatatgggcgattcagcctacgaagtgtatgtccgcgcccatttgctagaactcggtttaaccaaaccaacgcgcttgcaacaagtggcgacacattatgtgtcggctaaagcgcaagctgctttgattggtttgatgatcgatgataattatttaacagaagaagaaatgaatatttttaaacgcggtagaaatgccaaaagttatacgaaagccaagaatacgagtgtttcgacttatcggacctcaacgggctttgaagcagtttttggctatctatacttaactgaacaacaagagcgcgtcgctgaattagcccactggtgtattcaacaagtcgacgctgggaggacccatgagaaaaaataataaccaaccattcaaacaaaagaacaacgaattcaatagtcgtcggacggccaataattcggcaaagccaacgcgccgtccagctaacaagaaaccagcagcacccgtcgaagaagcagttgttgaagaacaaactgatttcgtcatcggaaaacacgcttctttagaaacattgaagaccagtgatgcgaagaaaatcaataaaattttcttacaagatggcttgaaggctgactttgtccacgatgttgtgaaattagcgaaagaaaaacgtctaatcattcaaaatgtgcctaaaaataagttggacttattgagtgaccgtcaaaatcaccaagggattatcttagcaatcgcaccgtttgaatatgcgtgtgttgatgatattttcgctaaggccaaagcccgagaagaagaaccgtttatcttaatcttggataacttggaagatccccacaacttgggttcaatcatgcggacagctgatgcggttggtgtgcatgggattattattcctaagcatcgtgcggtggggttaacatcaacagttgctaagacatcgactggtgcgatcgaacatatcctagtggcgcgtgtcacgaacttaacacaagaaattaagaaattgaaggaccgtggtctttggatttttggcaccgatatggctggtaccgactatcgtaagtgggatgctaaaggaccaatcggcttaatcattggtaatgaaggtaaggggctttcaccaattgttaaaaaagaagttgatcaaacgttgacgattccaatggtcggtcatgtgcaaagtttaaatgcgagtgttgctgcgggggttttaatgtatcaggcttataatagccgtcaacctttggtatagcagatgaaaaaacagatcttaattgcagatggttataatatcattgggaactggcccgagctgaataagttgaaacaaaatgatcatctcgcagatgcgcgtgatcgtttattgcagatattatcagaatatcgcaagtttcgtgagattgaagtcatcttagtatttgatgcaatgtatgtgccagggattaaacaaagttatgcgcagtatgatttggaagttgtcttcaccgatgaggatgaaacagcggacagttatatcgaaggcttagcgggtaaattaatgtcgccgattacgcaagtgacggttgtttcgagtgatcaagctgagcagtggacgattttttcacggggcgcattgcgggtgtcttcgcacgatttttatcgtgagattcgccgaacgcgccgtgaaattgaccatgatgccaagcattatcatgatcggaccttgcaacggaatatgccgtggaatccggcgcaactagatcaacttgcacagatgcgagatgcactaagtgctgaaaaagatgattaaacaaacgttctcttgataaatatacgataacttgttaagataaagacgtggggttgcgtgagaggtggttcgttgatggaatcagcaaaacgtgatgcaaacttaattcaagcggtggttgaaaacgattctgaggcgttggatgttttatttaaagcctacctaccaatggtttatcgcacctttactccatattatattcgcttatttgatgaggacgattggttacaagaagcgcgaatcgtctgttatgagacttgccagtgttatgatcaaaattgcggcaaaagttttggtggtttttataaattacgctttcaccaccacgtattaaacttgattcgcaaagaacttgctcagaaacgacgggtcgatcagcaagccctgttatttgattgttgtccggaatgcaatgcgctcgctgaagataccgttgcatactatcagtcaacggttgaaatgcgggcgtacttagagacactatctgctttagagttagtggcctttcgggttttgacggggcaactagcagttgagcaagcgtgtcgtcagctagattgcacgtttgaacagatgaaacgggcacaatcgcgttgccagacaaaattaaaacgattctatactaaacaataaaatagctaaaagctgctaaccgacgatttttaggcattggttagcagtttttttgtgtttagtagggagcataaaaaatacctttcatgcgataaaataacaggtgacaggttaatgatggggataggtcaacaaaatgggcggcttatatatttttaaataacattaattgacattaagaaagaaagcgcttatactaaaaatatagaagaaatgaaaacgctttttataagccttttgtcgttttctaatcaattaaaatttaaggggtaattcattatggcagaaaaaacaatcatgttatgttgtgcagcagggatgtcaacaagtttattagtttcaaagatgcaaaaggccgctgaagcacaaggcttagacgcagaaatttttgcaactggcgcttcagatgcagacaaccaactcgaatctaaaaaaattgactgcgtactattaggccctcaagttcgtttcatggaaggtcaatttaaagaaaaattggcaccaaaaggaatcggtgttgaagtaattgatatgaaggcttacggcatgatggacggcgaaactgtcttgaaacaagcgttagcattaatcggttaaaaaaagattaagaaaagcggtagcgacctatttttaggcggctaccgctttttttgtttatgaatcaggtataattaaggcaatcaagtataaaggagtttattcaatgagtttaattggtacattaatttggtggctattcgggggattagtagaggctatcggttggtttattctggggattgcctggagtattacgattattggaattccagtcgggctacaacgttttattggcgcattgaccttgatgccgtttaacgcaaccgttgtttcaacggggggtgcaggttcgtttttattaaacattgtttggtttttcttaggtggtcttgtgatgtgggcgagccatgtcttttgggggctattattatcaattacgattattgggattccatttggccggcaacactttaagctagcggcgttatcgttaagtccgttcggcaaacaaattaattaaaatgcaaaagggcaacgatattgatcgctacccttttttatgtggtgcaggcatatttctgtgcttagctacacaagtcaaacgattgcttgtagcaagcattcgccttgttaggctgatgctcgcagcataaccggcttttgacgcactctattgtgttagttcttctaatgccatcgcttgttcttcccagtctgattctgtttgagcgagttcagcttggactttttctaggtcttgttgtagttcttgaagcatgaggggtttagtaattacgtctgcttgggtcatttgttcttggattgcgttggccttagtctctagtgcggccattttttcttctaaagcagtaacttcgcgttctagtttccgttgtgcacgttggttttccttacttgctttgtaggcatcttgtgcatgggcacttggttggataattgcactgttttggctagctgcttctgcgtaagctgtttcttcagctttcttggcgaggtagtaatcgtaatcaccgaggtatcgtttgctaccagtatctgatagttcgataatgccagtggcgacttgattgatgaaataccggtcatgggaaatgaagaggacggtgccatcgaattcacggagggctttttccaagacttccttgctatcaatgtccaaatggttcgttggttcatccatgattaagaaattgtcatggttcatcgcgagtttcgtcaagagtaagcgggctttttcaccaccactgagttgtgacacaacctttaaaacatcgtcaccggtgaataagaaactaccaagtagtgtgcgaatttccttttcaggtgttgtatggtgttcatcccataattcgttgaggacggttttgttagtgtgtaaattgcgttgctcttgatcgtagtagcccattgaaacgttactaccgactttttcatggcctttgatgaacggaatttggtgcaagatacttttgagaagggtcgatttaccaattccgttaggtccgatgatggctaagcgttcgtggcggttcacttcaaaattgattggttgtaccatgattttatcgggggaatagccgacagcggcatcgcttacttgcaatacttcgttaccgcttggatgttcgctttcgaaatgaaaatgaattttaccggcttcgttttgcggccggtctaatttatccatcttttcgagttgacggcggcgactttgggcttgtttcgtggtacttgcgcgcactaagtttttatcaacaaaggtctgaagtttatcgatttcagcttgttgtttttcataagccttccattcaagtgagaggttagcttcttttaaacttaagaaatggctgtaattaccggtataatgggtcaatgtgtggcgactcatgtcgtagacttctttagtgattttatctaagaagtaccggtcatgcgagacggtgagcaaggcaccgggataagtttgtaaataattttccaaccatgttagtgtttcgatatctaaatggttcgttggttcgtccaaaataaggacgtcttttttctcaagcaataacttagcaagtgcgagtcgcgagcgttcgcctcccgatagtgtactgattggcttttcaaaggtgtcttctggaaattggaaaccatgtaagacgccacggatttcggcttcatagccgtaaccattagcttcagagaaatcgtgttggacttggtcatatcgttttagtaaggctgcatattcttcgctagcatggtcaatggttgtgtccgcaattgcggtctcgagttcatgcatttgggcttccatttggcggagatcatcgaaaatggttaacatctccgcatagattgtccgggttgagtctaagccactatcttgcgctaagtaaccgacttgagcatttttgctaagaatgatttggccttcatcaggcgttgtgatgccggcaatcatttttaataaggttgatttaccagccccgtttggaccaacgagggcaacacgggcgcggtcttgtacttcgagttgtgcgtttttgaaaaggtaatcgccgccaaaactgcgtgcgacttgttgaacttgtaataatatcacggctaaaaatcctttcgtgcggtgttttttaaagttaattgcgttcatttttataatactactgtcaactatcataacagatttaaacgatggacagtcaaaattgtaaatatattgcttttcacaagaaaattcagtatgatttcagtatgtactacactattttcacaagcaaatcaaaaaggaggtttcaaatggttgagaataatatcccaagagcaactgcaaaacgattgcctttatattaccgctatttaaactttttgaacaattcagggaaaactaaaatttcctctactgaattatccgaagcagttaaagtagatagtgcgacaattcgtcgtgatttttcatatttcggtgcactgggcaaacgtggttatggctatgatgtcgcttcgttgctagattttttcaagaagaccttgaaccaagatcgattgacaaacgttgcattgattggggtggggaatttaggccacgccttattgaactacaactttaagcaaaccaataatattcggattagcgcagcatttgatgttaaacccgaaatgattggaacaattcaaaccggtgttcctgtctattcaatggacgagatggccgaacaattgaagaaccaacagatcgagattgtcattttaacagtgccaattgatgaagctcaagaagtcaccgatgaattagtggccgctgggattaaagggattatgaactttacgccaattcgaatttctgtgccatcaaacgtgcggattcaaaatgttgatttggctaaagaactacaaactttgatttacttcctcgataattatactgatgaacaaaatcaagaataaaaatagcgtttaaacaagttgctcgtagtagccgcctgtttgaacgctttttttaacgattgagatacagtaaagtgacgatcaggttcatcccagcatggctgatgattgtggtgaaaatcgaacctgtcttgcggtacagccaacataggaaaagaccgatggccgtgtagattaacaaatgcccgtcctgatgtaaaaaagcaaacagtaaacttgaaatgatggcggctaaaatgcggtttaagcgactggctaatccaccaaagattgctttgcgaaacgtgatttcttccataatcggtgcggcgatggtcgttgctaaaataagaaacggttgttgttgcatcatggtcatcagtgaaatggtgttgagcgatttggcagtgatgtggagaatgttttgttcaatgaagccggcgagaatctgaattactaagaccagtacaatgccacacaccccccaaatgataatgggtttgagtgggaaaggccgctgctcaatggcattggcttgtgtgcgttgattaagatagagtaaccaggcggcaccgaggcaatcaacaatggttgtgattagaaaaaacgaggcagatagatgaccaaaacggacgactgcactaggaatcaataaaatgaacaaatagctaatgataattgaaaaattttgtttgtatagcgtcatgtgaaagctcctcaaaggttgttgtgacaatagcttagcgtattagcactcaaattgcaaaagtgctagcataatacttgcaatgttctgaaaaaatgctatgataaaaattgtgattagcacttgagatgatagagtgctaaaaaagtaaaattgatggagggattttaagtgttaaaaccattagaagatcgcgtgattatcgccgttaaagacgaagaagaacaaacagtaggtgggattgttttggcaagtaatgctaaacaaaaaccacaaaccggcaaagtagtcgcagttggtaccggcacattaacaagtgacggcaaacgtattccacttgatattaaagaaaacgatgaagttatttacgataaatatgcaggttcagaagttgaatatgaaggtcaacaatatttagtgctccatgctaaagatattatggctattgttgaataataataaacaaaaaaattttttgaggtgaataaattatggcaaaagaacttaaattttcagaagacgcacgttcaaaaatgttggcaggggttgaccaattagccaacacagtgaaaacaacattaggaccaaaaggccggaacgttgttttggaaaaagcttacggttcaccagaaattactaatgatggtgtgacaatcgctaaagcaatcgaattagaagatcattttgaaaatatgggtgctaagttagtttctgaagtggcttcaaaaacgaatgacatcgctggtgatgggacaactactgctactgttttagctcaagcaattattcgtgaagggatgaagaacgtcacagccggcgctaacccagttgggattcgtcgtgggattgaattagcaactaaagaagctgttaagaagttacacgaaatttcacacaaagtcgaaagtaaagatgccattgcccaagtggctgctgtttcatcagctaacgaagaaactggtcgtttaattgctgatgcaatggaaaaagttggcaacgatggggtcatcacagttgaagaatcaaaagggattgatactgaattaagcgttgttgaagggatgcaattcgatcgtggttacttgtcacaatacatggtaacggataacgataagatggaagctgacctagataacccatatatcttaattacagataaaaagatttcaaatattcaagatgttttaccacttttacaatcaatcgtgcaagaaggtaaagccttgttaatcatcgctgatgatgttgatggcgaagcattaccaacacttgtcttgaacaagattcgtgggacattcaacgtggttgctgtaaaagcccctggttttggtgatcgtcgtaaggaacaattagaagatatcgccacattaacaggtgccacagtgattacaagtgacctcggtctagaattgaaagaaacaactatcgatcaattagggacagctggtaaggtaactgttacaaaagatgatacaacaatcgttgaaggtgctggtagcaaagatgccatcgctgaacgggttgaaaacatcaagaaacaaattgctgaaacaacatcagactttgaccgtgaaaaattacaagaacgcttggctaaattagctggtggcgttgcagtgattaaagtcggtgctgccacagaaacagaattgaaagaacaaaaatatcggattgaagatgctttgaacgcaacgcgtgcagctgttgaagaaggctacgttgccggcggtgggacagcattaatcgatgtgatcgaaagtgttgctgcgcttaaagaagaaggcgacgttcaaaccgggattaacattgtgcttcgtgcattggaagaacctgttcgtcaaatcgcaaccaacgctggtcttgaaggctcagtaattgttgaaaaagttaaatcacaaccagttgaagtcggctacaatgcagccaacggcaactgggaaaatatgattgaagccggcatcttagatccaactaaggtgacacgttcagcattacaaaatgcagctagtgtggcggccttaatgttaacaactgaagcagtggttgctgacaaaccagaagacaacccagcaccagcagcaggcatggacccatcagcaatgggcggtatgatgtaaagaagtgcgtttgaaacgggttggttctgagcattaacctaaaaacgagcgttatggcggtttttgccataacgctcgttttgtagttaagcggaaggcgttataaccaaaaagcacgattaaatccaaagttccaaaactggcaaaagttttggaacttttttatttttcaaaaaaaatgcgcatatataaattgtgcgcaaccctattaattaattttgattgcggtataataatagttggaggtgttgacaatgatttttcgaaaccggcggatactgataacctgtttaatgttaggtggcttctttttagcgcgaccacaaacggtccaagcaacgcctgaagaaacgcaaactgccattaagacagcacaagatcatctatccgaattgaataataatattagtaatttaacgttaaaaacaacgcaattgaacgaacaaatgactgcaaaacaggcggatattaaagaaaaacaagacgagttcagcaaaacatctgctgattatcaaaagcaagtggcgattattgaaggtaacctgcggcaattacaaacacgagatagcagttttaatcttgatatgatcgatagtttattgtcgagccaaagtttgagcgatttattccaaaaaggttcaatcatcaatcgactgttagacgctaaggcggataatgccgctgaaacggcctcattagctgaaaaaaagctgaacaaaagactgaattagaagcgcaacaggccaagctggtatcattatcacaggaaaatgatgctgcaattaaggacttagatcaacaaaaacaacaagctaacgaccaattaacgcaactacaaacgaagttcaagaaagaattagaggcgcaagcggctgctcaaaaagcggcgagtgatgcaggtgccgcattaattactggtaacaaggatttaatgaataataagattatccaagaagcggttaaatatttaggcgaccctatgtttggggtggcaccacacccgaaggatttgactgttctggcttagtgcaatacgtttacgctaaaaatgggattaaattaccccgtgtttcacaagatcaaagtaagttaggcaaagatgtaccgctcaatgaattacaaccaaacgacctattattctggggaggggttggaacagcccaccatgtcgcaatctacattggggatggctactttatccaagcaccacaacctggcgataaagttcgaattactaaaatttcagattacaaaccggattttgcccgtcgtttatcataaaaaataagaactgaccaaggaatcgaggcgtttcgattaccttggtcagttcttttttaaattgtggtagtaattcatgcgtaactatagtagaatacgatttgtttgaataaacggcaattatttttttaagttatagagaaattcaaaagtcactgtgtggattgcgacgaatgatattcacatgagggctttttatgttagaaatattatttaaaggggtcatattgctatgcaacagttaaaacggatttttatcgggaaaccgttaaaatcttccgatgagggtaatcaaaaattaggacgctttaaagcgttagcgatgctatcttctgatgcattgtcatcagtggcctacgggacagaagaaatcgtcatcgtattgacgaccctttcggccgcggcaatttggtattcaattccaatcgcagcctttgtgctcgtattgctattgtcattaactttgtcatatcgccaagtgatccacgcctatccaggtggtggtggtgcctacgttgtttccagtgaaaatttggggaaaaatgctggtttagtggcaggtggttcactgcttgtggattacatgttaaccgttgcggttagtatttccgcgggtgcggaagcgatcacctcggccattccggcattgtatgggcatcaagtagggatttccttcattatcgttttgatcttgatgggaatgaatctacgtgggatgcgtgaatcagcatcatttttaatggtgcccgtttacttattcgtcttgatgatgactttaatgatcatcgttgggtgttataagatcttcacaggtgcgattccgttccacgcaacatcaaccgttggggctgttgtaccaggtgtttcgatggcgttgatttttagagccttctcatcaggttcatcatcattaactggggttgaagccatcagtaatgcggtaccatttttcaagaagccacgtgcaacaaacgcggctgaaacattagcaatcatggcagccatcttaggtttcttctttgctgggattacatttttaaactactggtacggcattgtaccagcagaaaaagtaactgttctatcacaagtggcccaacacacctttgggaaaggctttttattctatattgtgcaatttgcaacggcctttattttagccgtcgctgcgaatactggattctccgctttcccagtgttagcgtataatttagccaaagacaaatatatgccacacatgtacatggatcgtggcgatcgtttaggttattcaaacgggattattacattggcgattggttcaatggcattgattttcatctttaacggggatacatcacgcttgattccactttatgcggttggtgtgttcattccatttacgctttctcaatctgggatgttgcgcaagtggtgggtcgaacgaccaaagaattggtttggtaaatcaattgccaattttgttggcgctttgatttcgtttgctatcttagtcattctcttcgtttatcgcttacctgatatctggccattcttcatcatcatgcctgttatgatttggattttctataagattcatgatcattacaagaaagtggcgcttcaactacgcgtgagtgctaaagaagccgtcttgcatgattatgacggttcaactgtgattgtcttggtcagcaacgtgacccaagtaacccgtggtgcgctagattacgcacaatcaatcggggattatgtgattgcgatgcatgtctcaacggatgaaaatccagccaaggaacgtgaaattcaagctgaatttaaggaagattttccgaatgtccggttcgtcgatgtccattcatcataccggtcaattcaaaaaccaattgttcgctttgttgacattgttagcaagaatgcgcaaaaacggaactttacaaccacggtcttggtcccacaattcgtaccaagaaaaccatggcaaaacattttgcataaccaatcaagtctaagactaagaacggcatttgcaaaccgcgaaaacattattatttcaacatatagttatcacttaaaacactagaagtgcgactcgatctgagtaggctttgaagattaacagtaaaatgggcattgtggcggttcttgccatgatgctcattttgcagttaaccggaaaagactgatcgaggagcgcgttaaagaaagaagtgcgtttagcaaccgagcattaatacaaaattggcagttatcccgagttgtgggatgactgccaattttagattaagcggaagttggtgcaactaaaagcacgttaaaagagaagtgtgtttgaaacggtttgactttgagcattagcctaaatctgtgaatgagcgacggagttgatcgtttgcggattgtagctaagcgcaagagtcagtttcaaaaagcacgttaaaagaagaagtgtgttcaaaccgattatgttctgaggattagcaaaattagacgaataagcgacgaagtcgattggttggctaattaggctaaacgcaggaacatggtttgaaaagcacattatcagccccgctcaccttttcggtgcgcggggctttttttgtttttctacgggtacagcaaaactttttattctgggcaaaaattgctacaatagaagctatatcaaagtctgagaaagaacattaaggggcgcaacatgcgaattttatttattggtgatacagtgggcacaatgggtcaaaaaatgatcaatgattacctaccagcattaaagcaacaatacaaaccacaggtgaccattatcaacggcgaaaacatcgcggatggtaaggggatgactcaaaaggattataagaatcttttacaagctggggccgatgcgattacgatgggcaatcatacttggaataagcgcgatattttagaattcatcgacgatgctaaaaaattagtgcggccggccaattttccgaaaggaacgcctgggcaagggatgacaatgattaacgtcaatcaagccaaattagccgtgattaacttacaagggcgcgccttgatgaatgaactactaattgatccgtttgaaatgttagatgaaatggtggctgaaattagtaaagaaaccaactgtatcttcgttgattttcatgccgaaacgacgagtgaaaaactcgcacttgcttggtatcttgatggccggatttcagcgttagttgggacccatacacatgtgcaaacaaacgatgcgcgcgtcttacctgaaggcacagccgttttaacggatgctgggatgactggcccttataacgggattctaggcgtgaagcgcgaaaagatcattaatcggtttaaaacacaacggccagaacggttcgaattagtgaccgaaggaccgggtcaattgaatggctgtttaattgaaattgatgacaaaacgggtcacgctaaatcaattaaaccaatccagatttcaccagatcacccctatacgcaattttaagcaccttagcagcagatcaacgtcaatgagagagggattaacaacatgccacaaaaaacgaaagaaacgccaatgatggcgcaatatcaaaaggtcaaggatcagtatccggacgcttttttattttatcgcctcggtgatttttacgaactctttaatgatgatgctgtcaaagcttcacaattattggaactcacactaacagcacgcaataaaaatgcggatgatccaattccaatgtgtggggtaccacaccacgcagcccaaaattacatcgatattctagtcgatcaaggttacaaggttgctatttgtgaacaaatggaagatcctaaaaccgctaaagggatggtcaagcgggaagtcattcaactggtcacaccaggaacgatgatggatgaaaaagccggccatgccaaacaaaataattacttaacagcagtggtggcagatggcgatcagtttggctttgcttataccgatttatcaactggtgagatgaaagtcagccagattgcgagtttggatttattgctcaacgaaatgttgagtttacaaaccaaagaagttgtcattaaccacggtgttgccagtgaggttgtgcacgcgtttgttcaacagcaaattctcgtgtcgtatcaagaagatggcgatgcaacggccgaagtcagtttcgtttcacaaaacatctcccagccccttgaactggccgtgattaaacaattggtcttgtatttggcaacgacgcaaaagcgccatttagggcatttacaacgggcccaagagtacgagccatcccaatatttaaaattagaccattctgcgaagatgaaccttgaattaacggcttctttacgcactggtcataagagcgggacattattgtggttattggatgaaaccaagacggcaatgggtggccggttattaaaacaatggttagaacggccattattggatttaaaggcgattcaaaaccggcaacgccaagttgctagtttcatgaaccattattttgaacggacaaacttgcaagacgccctcacaaaagtgtatgacctagaacggctagcaggtcgggtcgcatttggcagtgttaatggccgcgatttaattcagttgaagacttccttggaacaaattccaacgattaaaacgattttaacgggcattaatgacgatcagacctttgaccgtgcgttagaccaactcgatccggttgatgatgtacgcgagctcattgaaacggctatcaatcccgatgcgccaatttcagtgactgacggtgggattattcaatcgggttacaacgaaacattagatgattatcgcgatgcgatgtctaacgggaaacaatggctagcacaacttgaagctaaagaacgcgaaattaccgggattcataatttaaaaattggctttaatcgcgtgtttggttactatatcgaagtgacacgtgcgaatttagacgcgctacctgaagggcgttatgaacggaaacaaaccttaaccaacgccgaacggttcattacaccggaattaaaggcgaaagaacaattgattttagaagccgaagaacgctcaaccgcgcttgaatatgagttattcacgcaagttcgcgaaaccgttaagttggagattgaacggcttcaaaccctcgctaaaagtgtggcggcccttgatgtcttacaaagttttgccgtagtcagtgaaaactaccactacgttcagccgacattaatgactgatagtcgcgaaattgatttagtggatgggcgtcatccagtggttgaaaaagtgctcggtcgccaaaaatacattcccaacgcggttcaaatgggcaccgatacggatatgctcttaattactggtccgaatatgtctgggaagagtacgtacatgcggcaactggctttgacggtcatcatggcgcagatgggatgttttgtaccggctaaatctgcgaacttaccgatttttgatcagatctttacgcgcattggtgcggccgatgatttaatttccggtcaaagtaccttcatggtcgaaatgatggaagccaatcgcgcgattatgaacgcgacacaaaatagcttgattctctttgacgaaatcggacgcggaacagccacctatgatggaatggccttggcccaagcgattattgaatacattcacgacaacgtgcatgccaagacactcttttcaacgcattatcacgaattgaccagcttagcggattcactaaccgcattgaaaaacgtccacgtcggggcagttgaagaaaatggcgagttagtttttttacacaagatgctggctggcccagctgataagtcatacgggattcacgtggctaaattagcggggatgccgacaccgttgttgaaccgcgcagatgtcatcttggatcaattagaagataaaccaaaggcagctgtcgcgccggctgctgaaccggttgaagaagtggatgaacaaatttcactattcgaaccagaagtggcaccacaagcggatccaaaagcagctaaagtcctagcggcggttaaacaattcgacttaatgagcgccacaccactagacgcgctaaacatgctatacaaatggcaaaaggaattaaacaaataagagtgcgtcatcaacgggtaacttctgagcatttacagcacttgacgaattggcgatgtaatcgccgatttggcaagtggggtaaagcggaagaagttgttgatgaaagcacatttcggataagagtgtattcaagcttatcaaacttttgagcattagcacagggaagcgaattagcgacgcagtcgatgatttgattcacagcgctaagcgcagaaagttagcttgaaaagcacgttttagcactaaatacccacacgtcagaaaaaggagaacgctaatggggaaaattcatgaactgtcagaaatattaagtaaccaaattgcggcgggcgaagtaattgagcggccagcttcagttgtcaaagagttggcagaaaatgcgattgacgccaatagtactcaaattgacatcgtgattgaacaggctggtttgcaattgattcaagtcatcgataacggcgatgggattgaaccggaagatgtacccactgcatttaagcgacacgcgacaagtaagattgccacgcgccaggatcttttcaaaattcagtcacttggctttcggggtgaagcgttagccagtatcgcgtcagtgtccgatttgacgattgaaacggcaaccgctgattcgttagggacatttgctcattttaaaggtggcgtcttagaagaacagaaaactaatccaattcgccctgggacggcaatcacggttcgtgatttattcttcaacacgccagcccgcttgaaatatgtgaagacgttccagactgaattggcaaacgtgatcgatatcgtcaatcgcttggcgatgagtcatcctcagattgccttcacgttaaccaatgatgatcacctgctgttaaaaacggcgggtaataacgatttacaacagacgattgccgggatctatggcgttacaatggctaagcaactcttgccagtcagtgcagaagatctcgattttaaattaaccggctatgtatcgctaccgaaactaacgcgggccagtcgtaattacatttcagtgttgattaatggtcgttatatcaagaattatcaattgaataaggcgattatcaagggttacggttcaaaattaatggtcggccgttatccagtcgtcgttttaaatattcaaatggatccactgttaatcgatgtcaatgtccatccgaccaagcaagaagtccgcttgagtaaggaacctgctttgatggcgttgattgaaaaagcaattcgtgagcgactcagcaccgagaatttaattcccgatgcagtgcagaatctaaaacaaacgaaaccggtcgatgtggaccagcttcaaatggatttaaaccaaattacgagtcaacggcgcaatgcgactggtacggtgcggccaattcagccccaaacagttcctgaaaagccggttaaaactgaaatgcaagcggcagcgcaaattgcggaaaccgaaacaccccttaaacgagaaccaactgctaatcctaatttaaatagcctgccgatatttgaacaaccccaacaattggcccggtgggatgataagtacgaagcagaggcggtcggaaatccgtttggtgaacaacctgaagatgatgcagcacccattgagcgtttcccagcgttacgctatattggacaactgcacaatacattcttattagcagaaggtgaagatggtttttacattttagatcaacatgctgctcaagaacggattaagtatgaatactatcgcgaaaaaattggtgaagttagcaacgacgcccagaatttattggtgccccttgtgttggaatatcccaatagtgatgcgattaagattcaagcacaaaaggaactccttgccgcagtgggtgtgcagctagagagcttcggccaaaatagttttgttatccatagtcatccgacgtggattgcgcaaggccaagaagaagcaacgattcgcgagatgattgacactgtattggaaaacgggaagttagacattgcccatttccgtgaaaaaacggcgattatgatcagctgtaaacagtcaatcaaggcacaccatcacttagatgatgtgcaagctaaagcattgttggttgatctggcacagacggaaaatccgtttaactgtccacatggccgaccggttttaattcattacacgcaaaaagatttagaaaaaatgtttaaacggattcaagatccacaccatagttgggagggcgaataatgtttatcttagcatcacaatcaccaagacgccgcgaacttttacaaaaagtcgtgcctgatttcgaggtccaacccgcaacaatcgatgaacgccaggtaccagtgacggcaccagctgactacgtgcagatgttggcgcaacttaagggtgaatccatcgcccaaaagaatcctcaggccactgtgctcagtgctgatactgttgtcagttttcagggtacgatttacggtaagccacatgatcgtcaagatgcagccgaaatgttacggcaattgagtggcagcacgcatcaagcttatacaggtgtttggttatccattgatggtgaaatccgcaaaacggttgtccaaactgatgtcacgttctggccgttaagtcatgaaatgattgaaacgtatttagacaccgaagagtaccgggataaggctggtgcttatggtattcagggacagggaagtctgctcgttgagaaaatcaacggtgacttttacaatgttgttggcttgcccatcagtacggtggctcggttgttaaccgctaaggaggctgactaatggcaacgcaaaacattgccgtttattgcggcgctagtagtggtaataaaataatctacacggaagcggctaaggcgttaggcacttggattgctgggcgcaatgcgcgcttgatttatggcggcgcccaagttggtttaatgggcaccgtggccgacacggtgttagcccatgatggacaagtgaccggcgtcatgccagggtttatgagtcagcaagaactcgtccatccaggtttaaccgaaatgattaaggttgatacgatgtcagcgcgtaaagccaagatgattgaactggcagatgtgtttatcgcattgccgggtggtcccggtacgctggaagaaatgagtgaagttatttcatgggcgcgaattgggcaacaaaatggtccctgcattttttataatgtcgcaggctattatgatttgttacaacaatttttagcccacatggtcagtgaaggttttttaacacaggtcgattttgaaaaatacttatttaccgattcgttgagtgtgatggcatcctttatcaaggattaccaaccgccgaagattcgtgaatactaattgctagggtttgagttggccgggggtcacttaggcccttcttttacgctttttggctgctggctgtttcacgattcggattttatgttacaatttaacaagcaaatatacgttctcgtaaagtaggtaaatttatgtatgaatatttaaaaggtttggtgacggcggttagtccgtactatgtcgtcttagaagttcaaggcgtcggctatcaattgcaagttgctaatccgtatcgttacaccgaatcaacgaccgatatcgttcagatttatgtctatcaagcggttcgtgatacggatatcacgttatttggtttttacgatctagatgaaaagcaaattttccaaaaattaatcagtgtttctggaattggtcctaagagtgccttggccatcttagccaatagcgatcattctgggttaatccaagcgattatgaatgatgatgtgagctatttgaccaagttccctggggttggcaaaaagactgcccaacaaattgtcttagatttaaagggcaagctcggcgatttggaacaaaccgaaacgatcgctggtcaaacggctatcgaacttggtacgcctggtgaatcaccagaattaaacgatgcgttagcggcattaaccgcgcttgggtattcagcccgcgaagtcaaagcgattaccaaaacactggctgatttcaatgcacaaactacggatcagtacttacgtgaaggtttacgcttattaatgaagaaataaaggaggactaatggatggcagaagaacgaattgtttccgcagaaaacgaagatttcgcagaaacaagtattgaaaagacgttacggccacaagtcctcgcgcaatatatcggtcaagaccgggtcaaaaatgagttggcggtttatattgaagccgctaaaaagcgggaagagtcgttggaccatgtgctattatatggcccgcctggtttaggtaagacgaccttggcgatggtgattgccaatgaactgcatgttcagattcggacgacgagtgggccagcaattgaacggcctggcgatttagtcgcgttgttgaacgagttacaacctggtgatgtgctatttatcgatgaaattcatcgcttgccgagagtggtcgaagaactactttattcggcgatggaagatttttacatcgatatcgtggtcggacaagggccaactgcgcacccggtgcatttcccattgccaccgtttaccttgattggcgcaacgactcgggccggtttattgtcggcaccgttacgtgatcgtttcggaatcgtcgaacatatggcatactatgatgaagatgatttggtcgatatcgttgaacgctcggcagatgtctttaacatggccattgtccaagaaggcgcgcatgagattgcccgtcgttcgcgggggacgccgcggattgcgaaccgcttattaaaacggattcgcgattacgctcaagtggcggaccaagcggcaattgatcaagcgattgccgaccatgcgcttagtcaactacaagtcgatgtacgtggcttagatagtattgaccgcaagattctccagatgatgattgactattatcatggcggtccagtcggtctaaagacgattgcggctaatattggtgaagaaaatgaaacaatcgaagccgtttacgaaccgtatttattacagattgggttcttaaaacggacaccgcggggacgtgttgtgacgcccgctggttatgaacatctcggtattccctattcagaaaattagaaagaggttacacaatggtttcaacagaagattttgattataatttaccagaagaattaattgctcaaacaccgatgattgaacgggcagcgtctcgtttattggtgatggatcacaaaacaggcgcactagaagataaagttttctacgacattatcgatgaattaaatcccggcgatgcagttgtcatgaataatacacgggtcttgccagcacgtttatatggtgtgaaacctgatacgggcggccacgaagaagtcttgcttttaaacaacacgcatgacgatgaatgggaagtcttgatgaagccagcacgccgggccaaagttggtaccgaagtcgtttttggcgatggtcaattaaaagcagttgtgaccaaggaactcgaacatggtggccgcatgattgaattcaagtatgacggcatcttcatgcaaattctagaagctttaggtgaaatgccattaccaccatacatcaaagaaaaattagatgatccagaaatgtatcaaacggtttatgctaaagaacctggttcagctgccgcaccaactgctggcttccactggacagaagaactcttgcaaaaagtgcaggataaaggcatcaaactcgtgtacttaacgttgcatgttgggttgggaactttccggcctgtttcagaagacaacgtggaagatcacaaaatgcacagcgaattctaccgattaacagaagaagctgctgcaacgttgaatgaagtcaaacaaaatggtggccgcattgtggcaacggggacaaccagcattcggacgctagaaacaattgcgacgaagtttgatggtgaactcaaagctgatagtggctggacatcaatctttatcaaacctggttatcaatggaaagctgttgatgcattcatcacgaacttccatttaccaaaatcaaccttagtgatgttggtcgcttcatttaccggtcgcgaaaacatcttaaatgcttatcaacacgctgttgatgaacggtatcgtttctttagcttcggcgatgccatgtttgttaaataattcgacaaaaatgaggtggcagcattgatgtatttgagaaaagcaacgtttacagatttaccgcggattttagagattatcgaacatgcaaaggccgccttaaagaatcgccagataaatcaatggcaagcaggtgaacctaatcaaactcagtttgaagacgagattcgccaagaattatgttacattctgatggctgatcaacaggtgattggggtcgcctcaattctagcaactgaagatcctggctatgcagcaattaccaatggtcaatggcaatctggttcgacaccttatttttcaattcaccgcgtcgcacttgatagtgctttccacggccaacatctcgggacacagtttttaaccttattggtgaccgctgccagtttacgaggcgcacatgatttacgcatcgatacgcaccctgataacttggcgatgcaacatatgattcaaaaagtaggctttcaatatcgtggtgacatcttcattgcaaacgatccgtcaccgaaacgctatgcgtaccaattattactgaaccaacaataatcctagaattggagtcgattaaatggaaccagcgatcaagtatcgtctaatcaagaaagaaaaacataccggggcgcgccttggtgaaattgtgacaccacatggcacgtttaaaacacccatgtttatgcctgttgggacccaagccagtgttaagacaatggcgcctgaagaattaaaagaaatgggtgccggcattattttatcgaacacctatcatctctggttacgacctggggaagacatcgttgaaaaagccggtggtcttcataagttcatgaactgggaccgcggtgtgttaaccgattctggtggtttccaagtgttctcacttgcgaaattacgggatatcagtgaagaaggggttgctttcaagagtcatttgagcggcgaaaaactgttcttatcaccggaaaaagcaatccaagtcgaaaatgctttgggtgccgatatcatgatgagtttcgatgaatgtccaccattctttgaaagttatgactacgttaaaaaatcagttgaacggacatcacgttgggctgaacggggcttgattgcgcatcaaaacccagcaacgcaaggtctatttgggattgtccaaggggccggctttgaagacttacgccgccaaagtgcgcgcgatttagttgggatggacttccccggttattcaatcggtggcttatcagttggtgaatcaaaaggcgaaatgaatcgcgtgcttgatttcacaacaccaatgttacctgaagacaaaccacggtacttgatgggcgtcggttcgcctgatgccttaatcgatggtgtgattcgcggtgtcgatatgttcgattgcgtgttgccaacccggattgcccgtaatgggacaacgatgacctcacaaggccgattagtggttaagaatgcgaagtactcagaagacttccgcccattggatcctaagtgtgattgttatgtctgcaagaactacacccgcgcttacattcggcacttgattaaagcggacgaaacgtttgggattcatttgacgagttaccataacttatacttcttgattaatttgatgcatcaagtgcaagatgccatcgaacaagataatttattggaattcagagaagcgttcttcgaagaatatggttacaatgaaaagaacactcggaatttctagtgaatcactggaagttgcttgataagtctgatagagttagtaatagacaaaattgaaaagaggttttttaaatggcaaactttgtgttaggtgccggcggttttaatcccagtttcttcgttatcttaattttaatgatggcaatgatgtatttcatggtaatgcgcccacaaaagaaacaacaacaaaaacaccaagaaatggtgaaccaaatgaaaaaaggcgacgcagtcatcacaatcggtggtctacacggtgtgattgattctgttaatacagatactaaaatcgttgtcttagattgtgacggcgtttacctcaagtttaacttgagtgcaatccggacagtaacaccaactgcttcagaagccgcaacagtggttgaagaagaaacggttgaagaaacaaaagaagatacaaaataattcagagagcgctcgattgaatacttcaaccgagcgcttttttatttgcattatatagtgaatttattatcaaaagtaggcttttaaaagataaatcgcctttaactaagaaataaaatttgtaattataatcacaaaacagtttacaaacaactcaaaatgcgctaaactaactttgttaaataaatcacaatagttaattggcatggagggaatcgatatggttaagaaagcagcagttgaaacggttgaaaacacagtgaatgaaatggtcaccgatttagtgacgcgtgcacaacgggcattagcaattttggaaacattcgatcaagccaagattgataatattgtccatcaaatggcgattgctgggttagaccaacatatggcactcgctaagatggcggttgaagaaactggccgtgggatttatgaagataaagccatcaagaatatttttgcaaccgaggaaatttggaatgcgattaaagacaataaaacagttggtgtgatcgaagaagatccagaacatggcatcactaagattgcagaacccgttggtgtcattgctggtgtaacaccagtcacgaatccaacctcgacgacgatttttaaagctgagatcgcgattaaaacgcggaatccaatcatctttgctttccatcctagtgcgcaacgttgttcggctgaagcattgaatgtcattaaagctgcagcggttaaagccggtatgccagcagatgcactcttatatatcgaagaaccaagtattgcagctacccaggctttaatgaaccatgaaggggtcgcaactgttttggcaactggtggtcctgggatggtgaaagccgcttattcaactggtaaacccgcactgggggttggggctgggaatgcgccagcgtatatcgaagcttcggcgaacatcaaacaagccgtcaatgatttaatcctctcgaaatcatttgataacgggatgatttgtgcttctgaacaagccgtaattgttgatgctgaaatttatacggcagtgaagaaggaattccaagcacaaggggtttacttcgctaaaccaagcgaattatcagcactcaatgacgcagtaatcgacccagataagaatgcggtccgaccttcaattccaggccaatctgctgctaaaattgccaaactagctgggatcgatattccagaagatacgccagttttaattgctgaaattaaaggtgttggacaccaatatccactctcacatgaaaaattatcacccgtacttgcgatgattaaagctaaagatcgcgaagatggcttgcaactctgtgaagcaatgctagatcttggtggtcttgggcatacggcttcgttgcatacaacggatgaagctttaccactcgaatttgcaaaacggatgaaagcatgccgggtcttagtgaatacaccatcagcacaaggtgggattggtgatttatacaatgacatgttaccatcattaaccttaggctgtgggtcatacggccataactcaatctcccacaacgtttcaacgatcgatttgttgaacgtgaagacgctaaccaagcgccggaataacatgcaatgggtgaagttgcccagcaaaatctattttgaaaaaaattcagtcaactatttagaaaaaatggcggacttgcataaggtttttatcgtcgctgatcaagggatggtcgacttaggttacgtgcaaattgttgaagacgtcttggcgcgccgcacagatcaagtgcaggtccaagtatttgccgatgtcgagccagatccatcaaccgataccatttataaaggcgccgaagtgatgaaacgcttcaaacccgatacaattgttgctattggtgggggctcagtcatggatgcggccaaagggatgtggttattctatgattcagaagatgccgacttctttggcgctaagcaaaaattcttagatattcggaaacggacttacaagttcccaaacctcgatcggacgaaactaatctgtatcccaaccacttctggaacgggttctgaagtaacgccgtttgcggtcattactgatagtgaaacgcacatcaaatatccattggcagattatgcgttaacaccagatgtggcaattgtggatagtcaattcatcgaaagtgtgccaccccgcgtggttgcgcatactgggatggacgttttatgccacgcgactgaaagttacgtatcagcgatggcgtcaaattatacaaaagggctcagtttgcaagccattaaattagtgtttgataacttacaagcgagttatgcgggcgataagacagctaaagccaatatgcatgatgcgtcaacaatggcgggaatggcgtttgccaatgcgctattaggtatcaaccattcactggcgcacaaactgggcggcgcgttcaatttgccgcacggattgatgattgccattacaatgccgcatgtcattcgctataatgctaagacaccaacgaaacgagcactctgggctaaatacagttacttcagagcagatgaagattatgctgaaattgcacgttatctcggtttaccaggtaaaacgactgaagaactggtggccgcttacgcagatgctgtgactgcattggcggaaagtatcggcatcaagatgcgtttacgtgataatggcgtgacaaaggccgactttgatcgccacgttgatgatttagcagaactggcatatgaagataactgtacggtaaccaatccaaaagaaccattaattaaagaattgaaagggattctcgaagcagaattctagcaaattgaccaagtgatttgctagaataagtggtttgagaagcccgaccacaaatttaaggcggtagactgaaacaaatcggtctaccgcctttttttgttgctgaaaagagattaattttttactatttaagggactaaattgaagcttgatggtatgaaaattattacaaataaggcataatagaaagtagacattcatttagttcagggataactaagaaaagtttgtcgacaaacttgattaaggatctggatggcaatgacacccaataaagaagactatttaaaaattatttttgaacttggtggcgacgcaaagaaagttaccaataaggaaatactagcgggattgaacgtttcggcggcatcagtcacggaaatggtcaataagttagtgaaggaaaactacgtcaaccacacaccttaccaagggattcaactaacaagtgaaggcgcccgcgaagcagccctattagtgcgcaatcatcggttatgggaagtttttttagtcgacaagttacattatcaattcaatacggtgcacccagaagcagaacaactcgaacatgttactaatcacgacttggctgaacggttagctgatttcttggggcatccaacgcgttgcccgcatggtgggattatacccaatgccaagggggaattcgaacaacaaagtcacatcgcacttgaaacattacaagtgggtgaaacggcgattatcgatcgcgtattggatgataatgacttattaaaatatacactggaaatcggcttgtcagtcggtgacagtgtgacgctccaaaaggttggcctcttcgaaagtccgttgactgtttttaataatacgagtcaaacagaaatccaaatcggcctcaaagcggcacaacacatctttgtgacgccacaaaattaatttatatgaaagtggtgtgagatatgcacacagatttagcagcactctttattatttttggtggttccggggacttagcccaacggaaattataccccgcattatttaatttataccggaagggttatttaaaagaacacttcgctgtcattggaacagcacggcggccatggacggatgatcattatcacgaaatcgtcatgacagctttggacaactttgatgaagatcaagcaactaaagaagctttcgtaggtcatttctattatcaatcacatgatgtgacggacgccaagcactacgaaacattaaaggctttagcaagtcagttggatgaacaatacgaattacaccaaaatcggatttattacatggccatgtcaccacggttcttcgggacaatcgcaagtcatctcggatcagaagcgctcctaacggcggatggctttaaccggttgattatcgaaaaaccatttggtcgcgattatgaaagtgctaaggcgcttaaccaagaattgacgcaaacctttgatgaagaccaaatctaccggattgatcactaccttggtaaagagatgattcaaaatatcgttgctttgcgttttgggaacggtctattgagtggtgtatggaataatcaattcattgataacgtccaaattacgttggctgaatcagtaggggttgaagaacgcgctggctattacgaaacatcgggggccttgcgcgatatgttccaaaaccatatcatgcaagtgatcggaatgcttgcaatggaagtgccggttaactttacggcagaagatgtgcaacgtgaaaaaacacgtcttttcagaagtattcaaccttactcaccagcagaaatcaaacaaaactttgtgcgcgcccaatatgctgaaacatcggtggatggcgaaaacaagccggggtatcaacaagaaaccaacgttgcgcctgattcacaaaccgaaacatttgtcgctgggaaagtgatgattgataacgaacggtggtgtggcgtaccattttacgtccggaccggtaaacgattggcacgtaaagaaacgcaaatcaatatcgtcttcaagaagactggcgtcaatatttttgctgatgataagtcagattgttcagcaatggcacctgatgtcttaacaatctatgtcgaaccggaacaaggcttttcattaacgattaatggtaaagaagtcggtcaaggattcgccttgaaacctgatcaattggcttaccaatatgatgaacagatgttggctgacagtccagaagcttatgaacgtttgattttagaagcgctcaatggggatggcacgaacttcacacattggcatgaattagccgcttcatggcaatttgtcgatgcgattcgtgaagtctgggatgcggatcaaacgccactaccaggttactcaatcggttcaatggggcctaaagaagcaacagatttactggcaacaacaggggccgaatggatttttgatcccactcaaaataattaaattaaacaagtcagcaaagtctgtgtatgagatgctcatgccaggcttttcttattgaaagaagtacgtcatcaacgggtaacttctgagcatttacagcacttgacgaattggcgacggaatcgccgatttggcaagtgaggtaaagcggaagaagttgttgataaaagcacgttaaaggaagaagtgcgttaattcgcggttagcctttgagcatttgcctagtcagacggataagcgccaagggcgattatttggctgatgtagcaaagcacagaaggttacgaattaaaagcacgttaaaggaagaagtgcgtcaaaagcggaacaatgtgcctgaaaaagcatgttgaaaaaattaaggaggggtaacatggcagagctgttcaagattccattagaaaatgatacgagtcgcaaaattattcacattgatatggacgcgttttacgcatcgattgaagagcgtgaacagcccgacttacgccaaaagcccctcgtgattgcccgtaatccgagtgatactggtggcaaaggggtcgtgacgaccgcgaactatgttgcccgacaatacggtgtgcactcggcgatgagtgcgcaaaaagcagctgaactgattccgaatcaccaagccgtttttaaggcgcccaattttccgctttatcaatcggtctcggaacagattcacacgatttttcatacggtaaccgataagattgaaccgattgcttttgatgaagcgtaccttgatgtcacggaaaataaactcggcttggcacacacaattgatgtggtcgcctacattcaaaaagaaatccttaaagaaacccaactcgtcagctcggcggggatttcgtacaataaattcttagcaaagatggcatcggattaccgcaagccagcggggcggacactcgttttgccggaacaagcgattgcctttttaagtcgcttgccaattgaaaaattccgtggggtcggtaagaaaacggcgccgcgaatgcaagaactcgggattttaacgggggcggacttgcttgaacaatcagaaatgatgctgatgcaaaatttcggcaagcttggctacggcttatatcggcacgtgcgcggcatcgataatcgcccggtcgcctaccaacgtgaacgcaaatcaattggcaatgagaatacttacgggcaacccctaatcagtgaagagcaggtgcaagttgagttgaagaagttagcgattgaacttgaacggcgtttacgcaagaatcaaaaacacggtttgacagttgttttaaaagtgcggaatcgccaatttgaaactattactaagcgtaaaacatttaacgaatatgtcggcaaggcagctgaactcgaggcgatcgcttgggaaatttggcaaaccatcggccatgcagaagatggcgtgcgcttgctcgggattacggtgactaacttggcaccgcaaacatttgaaaacatcacgttaccgttatacgattgggagcgtgaatagttgagtttcctttgtttttgtgcgctaaaaccgatatactattaataactatgtaaatctgataaagggtggtggcgttgagtggcaactaagcatgatcaaattttaatgtacatcgaaaatttaccgattggtgacaagatttcggtgcgctcaattgccaaaacactctcggtaagtgaaggaacggcttatcgcgcaattaaagcggcagaaaataacggcctggtcagcacaattgaacgggtcggtaccatccgcattgaacagaagttaaaggggaagattgaaaatctgacctttgaagaaatcgttcaagtgattgacggcgaggtccttggtggccgcgctggtttagacaagttgttggacaaatttgtgattggcgcgatgcaaatcgatgccatcacgcgctacattacgccaaagtcattgatgattgttggtgatcggacggatgtgcaacgtttagcacttgaaaacggggccgctgttttgattaccggcggttttggcacttcggcggacgtcattgcattggccaacgacttggctttaccgattttgcaaactgcctacgatacctattcggtggcggcattgattaatcgggcgttgaccgatcaattgattaaaaaagaaatcacaacggtggctgatatctaccacccacttgctgaaatccacacgttacatgctaatcaaacggtggccgactacaagcaattgagtgcggcggtaaaacaatcgcgttttccagtcgtcaacgaacatatgcgcctcgttgggattgtgacggtgaaggatattttagataaaccggccacgatgaccttggataaagtcatgaccaaggaacccgcgagcgttaaaaaatacatgagtgttgccagtgtcggccattcaatgacttggaatagtttagaagtgatgccagtggtggcggacaatttagaactagaagggttaattacccggcaagatgtcatgagcaacatgcaaacggcgcaacgccaaccgcaagtcgccgagacgttttatgatcagattgtcgaaccactgcgtcctagtgaaactgtcccagacttttatacggcggcatatgaatatgaagtgacgccccagatgacgaataacttagggacaatttcgtttggtgtactgaccgaagcggtttcggcagcttgtcaacaaatgctccagacgcaacatcagcgctattcaatgattgaacagatcaacctccattatttacggttgattcaaatcgacacgcagattcagattttaccacgcttgctcgaaattggacggcgttcagctaaaatcgatgtcgatgtttacgccaatcatgtgattgtggctaaggccctcgtcactggtcaactcttagaaagaggttaataaatgacaactccagaacaaattattgctaaaattgaaacttacgatacgattatcatccatcgtcatgtcaatcctgatcctgatgcgattggctcacaagttggcttagctgaagtactgcgtaacagctacccagacaagacgatttaccaagtcgggagcgacaccggtaacttggcatggctcgcaaacgttcaagaaattgaaccggctgcttatcaaggtgcattagtgattgtgactgatacagccaactcacctcggattagtggtgagacgtttaacttaggcgctgaattaatcaaaattgatcatcatcccaacgatgatccttatggggatttaaactgggcgttacctgatgcctcaagtacctcagaaatcattattgacatcgtcaataacagcgaaggccacttacaattcaatcaagcagctgcgcgtgttttatatgccgggattgttggtgatacgggacgcttcatgtttaattcaaccagtccacataccatggaatgtgccgcccaaatgatgacgtttgatattcaccatgataagctcaatcaaaagatgaacgaaatcacgttggaacaagccaaattacaagggtacttattcgatcaacttcaagtgaacgaccaacaagtcgcctacttagtggttgatcgcgcaacccaggaccggttacatgttgaaccgcaacaagtacactcgattgttggaacacccggtcgtttgaaaggggtattaacgtgggtcatcttcgtgcaacaagcagatgacacttaccgcgtgcatttccgctcaaagggcccaatcattaatgaactagcgaagcaacatgatggcggtggtcatccactcgctagtggcgctaaggcagctgatcaagctgaaatcgacataattattgcagaattatcagcgctagccgcgcagtacactgaatagacgcagatccagatttaccggattcaaacaatagaaagcaggactttatggataatcaatttacacaatttaatctaaaacccgaaatcattgcggctttagacgacatgcactttacaaaacccacggcggttcaacggcgtgtgattccagccatcaacgctggtaaaagtgttatcggtcaatcacaaacggggagtgggaaaacccacgcgttcttattaccccttttaaataaactggtgcctgaaaaagacgaagttcaaatcgtcatcacagccccaagtcgcgaattggcttaccaaatctatacggctgccgaattaatcactcaacacatgacgggggatattcggattggtcgttatgttggtgggactgacaagcaacgccaaatcgaaaaactcgaacaacatcaaccacagattgtgattgggactcctggtcgaattttagatttaatcaagagcaaggcgcttaagatttatacagcgaagatcttggtcatcgatgaagcggatatgacacttgacatgggctttttgaagccagttgatgacatcgctagtcgtttgccagaagacttacaaatgatggtcttctcagcaaccattcctgataagttacaacccttcttacaaaaatacatgcacaatcctgtgattgaagaagttaaaaacgaaactgtgattagcccaacaatcgacaactggttagtgccaacgaaggggaaagccctcaaccaaaccatttattcattattgacgatgggccatcctttcatggtcttggttttcgctaatacgaagagcaaggttgatgacatccaccgttatttacaatcacaaggcttgaaagtcgctaaaattcatggcgatattccaccacgccaacgtaaacggattatgaaagaaattcataacttagactatcaatatgttgtggcaactgatttagcggcccgcggtattgatatcgaagggattagcatggtcattaatgctgaagtcccacgtgaagatttagaattcttcattcaccgggttggtcggactggtcggaatggtcttaaaggaaccgcgattacgctttatggtccagatgatgaacaagccgttgcacaaattgaagcaatgggcatcaagttcacaccaaagacatttaaagatggcgaattggtcacatcatatgatcggaaccgtcgtaaaaaacgggtagctaccacgcatgaattagatgtcggcatgaaagggatggtcaaaaaggccaaacttaaacgcaaacccggttataagaaaaagattaaagcagccattaaacaagatgcacaaaagaaacgccggattgaacaacgacttgaattacgtgaaaagaaacgtcaaaacaagaagcaaaatagctagttaattcataatcgaggtggctgtgatgcatgaaaatgacttacaattactgaactggttatcgttatccgaagaagcacggcgcgctaattttggccaggtgttgcgctactttgttagcccgctgattccaattgaagcgattcagagtgagaccgcaacgattggcactcaagtatttcaaacttacagtgcccggctagctgggcagcagtttatttttatccccggccaagctaaggtgcagttgggatggcaagcaggggcagcccacttagcaccgagtgagtggtttgcacaaactaaacatacgttaccagttgatcaaggactcgtttgggcgacgcaagcggatgtcgatcaatacgttgatcagatgacatcagaatatcggattgttaatatggcaccgatgttagtggcacaaacaccaatttcaagtgagtgggtactccaaggcgagtatgaaacgacaacaggacgttttaatggaaaccaactagttgggcgtcagtttttggcggaaatccaaaataccttgtttcgggcgcggcgggaacaaaattcagctgaaacacttgaaagtgcgcacctaattttacaagcgggtgggcgaccagattgttaccaagtgtttgaaaaaactaatggtgatgaaagtgaactacgccagacattgcggcggcgcggttttgatctggtgagtgttgatcagtatgaatggcttaaaggtgcagggagtaagacgttgtggttaagtggtaatcacttaccacgaccgactcagcgccagcagatgccatttgggttacaagcaacagccgctgacggttatgaacttactcaagatccacttgtttataagggtggtgcttgtgtgacagggggacggtatagtttggaacaatggttgcctgaagcacccgcctatgaatctgggattcaaacggcggcattgggcaatccgacgcttcagtgctactatcggcctgcgattaccgttaccttggattagttgacaattcagcaaatcttttttatactttggaagtgttgggatatacgcaacgaactgacggagacaggaacgcctttctagactgagagaaggtgccgccattggttgacgtgctccccaacatcacaaacaattcaataaactcataaagaggttaacgactaacatcgttgcaatcaaggtggtaccgcgcttttgcgtccttgaaattgcagcggtgttttatttttttgaaggagcaaacatgatgaaaaaactaaccagtgcgcaagtgcgccaaatgttcttagatttctttaaagaaaagggtcatgatgtcgaaccaagtgcatcgcttgtcccagatgatgatccgacattattatggattaactcaggggttgcgaccctaaagaagtatttcgatggtcgcgttgtacctaataatccacggattaccaatgcacaaaagagtattcggaccaacgatattgaaaatgttgggaagactgctcgtcaccatactttcttcgaaatgctcggcaacttttctgtcggggactatttcaaagaagatgcgattccatgggcttgggaattcttaaccagcgacaagtggattggtttcgatcctgaaaaattatacgtgacggtttatcctaaagatcaagatgcgcaccggatttggcatgaaaaagtcggtttgccagaatcacacatcattgaagttgaagataatttctgggatatcggtgaaggcccctgtggccctgattcagaaattttctacgatcgtggtcaaagcttcaacaacgttagcgaagatgatcctgaaaactatcctggtggcgaaaacgaacgttatctggaagtttggaacatcgtgttctcagaattcaaccatttaccaaacggcgaatatgttgaacaaccccacaagaacattgatacggggatgggcctcgaacgacttgtttcagtgattcaagaagccccaaccaactttgaaacagatttattcatgccattgatcgaagcgacagctaagatgagtgaccacaaacaatacggtcaaaatgcagctgatgatatttcattcaagattatcgcagatcatgcgcgggctgtgacgtttgcaattggtgacggtgcaatgccggccaatgaaggtcgcggctatgtactccgccgtttaattcgtcgggccatcttaaatggtaagaaactcggcatcaacgacgctttcatgtacaagttagtaccaatcgttggtgaaatcatgaaaagctattacccagacgtattagcacaaaaagaattcatcgaaaaagtcatccgttctgaagaagatcgtttccgtgaaaccttgaatgatggtttacgtttattgaaccaaacgattgacagtgtcaaagctactggtcaaagtgaaattgctggggcagatgctttcaagttatttgatacgtatggtttcccaatcgaattgacaactgaatatgccgaagatgaaggcttaacggttgatcaagctggtttcgaaagtgaaatggcacaacaaaaatcacgtgcacgtaatgcccgtagtgatgaacaatcaatggggatgcaaaacgaacttttaatggatatcaaagtggaaagtaccttcactggttatacaacgcttgaaacagaaagtaagttaagcgtcatcttacaagataatgccgaacaacaaacgattaagagtggtacggcgcaattaatcttcgaccaaacaccattctatgctgaaatggggggccaagttgctgatcaagggatcattaagaacctagctgggcaagtagtcgctaaagtgactgacgtgcaatacgcaccaaacgggcaaccattacacaccgttgaagtgctcgaagaaatgattagtggtgtccactatgtcttatcagttgatccaaccttccgcggtggcgtcattaagaatcacaccgcaacgcatttattggatcaagccttgcgtgatgttttaggcgaacatacgcatcaagctggttcattggttgaacctgactacttacggtttgattttacgaacctcggtcaagtcacaccagatcaattagccactgtggaaaaaattgtgaacgaaaaaatttgggctgcactacctgtgaatactgttgaaaccgatattgaaacagctaaacaaatgggggccatcgcactctttaccgaaaaatatggtaagacagtccgagtggttcaaatcggtgattactcaatggaactttgtggtgggacgcatgctgctaacactgctgatcttggtctattcaagattacgagcgaatctgggattggtgccgggacgcgccggattgaagccgtgacttcaaaggcagccttcaagtatttgaatgacaaacaagccttgttaaatgaattagctggtgaattgaaagttgctcaaaccaaggatttacctaagaagattcaacaattacaatctgacttaaaagcagaacaaaaagaaaacgaacaactcaaagcaaaatttgcccaacaacaagctggcaatgtttttgaaaatgtcgaaacagttggtcaatggcgcttagtggctgctgatgcaaaagttgccggaatgaacgaattacgacaattagcggatcaatggcaacaaaaacaaatttcagatgtcttagtgctcgcaacagttgcgggagataaggttagcttgattgtcgcggtcgcacctgatgcgattaaagcggggattaaagccggtgatttgattaaacaaatcgcaccactcgttggtggtggcggtggtggccgtccagacatggcccaagctggtgggaagaatccagctgggatcgcagatgctttggcagctgctaaaacagctttagcgaacgcttaacttataacgggattgtcgtcaattttttattgattgcaatcccgttatttttttgttctttttgttaatcaatttagcgaaatgtgttatagttatctctcatccgcattctgctaagagaggggagagttgtactttgtcctgttttcgagtagaatatggttgtataagtagcgaaaagttgaggtgttgagagatgaatctagataaaacagtccattttgattttggtaaaaatagccccaagaatgttcatgaaacattaacgacggtctatcagacattagaagagaagggctacaacccaattaatcagattgtaggttatctgttgtccggtgatccagcatacattccgcgctataatgatgctcgtaatttaattcgcaagcacgaacgtgatgagattatcgaggaattagttaaaaattatttggataaggaaacgacgaaataatgcgcttaatgggatttgatgtaggatcaagaacggttggcattgcgattagtgatctattgggctggacagctcaaggggtcgagattattcgcatcaatgaagatgaatcagaatttgggttagaccgcgtcaaggaattggttgcagaacatcaagtgactggttttgttttggggttacccaagaatatgaataattcgattgggccacgggcgcttaaagcgcaagaatacggggcaatgctgagtgaacttttcccagagattccggttgattacatcgatgaacgcctaacaacggttcaggctgaacgcatgttagtggaacaagcagatacgtcacgtaagaaacggaagcaagtgattgataagcttgctgcggtgatgattttgcagaactacttggacgcgcacggtcgcttaacacaaggctaataaataaaacaattaaggagttttgatgaatgactgaagataacaagaacatccaccaagatgaagaacaacaaattacactaatcgacgaccaaggtaacgaggaattataccaagtgctctttacatttgattcagaagattacggtaaatcatacgtgctattgtacccaacaagcgctggagaagatgaagaagttgatatccaagctttctcattcacatcagacgatgcaggcgatgccagcaaaggtgacctattcccaatcgaagacgacgaagaatgggaaatggttgaagaagtactaaacacatttttggcagacgacaacatgaaataagtgcgttcaaaccggttatactttgaggactagcatagtcccgtgaatgagcgacgaagtcgatcgtttgcgggacgtagctagccgcagaagtatggtttgaaaagcacgttaaagaaaagaagtgcgtcatcaacggggaacttctgagcatttgcctaacttagcgaattggcgatgcaatcgccgatttgataagtgtagcaaagcacaggaagttgttgatgaaagcacgttatcaccatctatttcaaaaagggtcccgatagcaattaattaaattgcagtcgggaccctttttttatgtggagaaggtgtgggttgaaacgtgctttttaaagctgactcttgtgcttagcttcgtattgcaaacgaccgactttgtcggtcattcacaacactgtgctaatgctcagagtcaacccgctttaaacgcactctataataattttttcgctttttccgtgttaataaaatgcaatttagcgaattcgcctaggtaatcgatgccaccttgtgcgagtaaatctgcggcgatttggttaactgcttgatgattgccgagcggaatttggcggcccgcttttttagacagttcaagcattgataggttggcttggtggcgcgcaatgattgaagcggcagcaacggcgaggtgaaattgttccgccttggttgagaaataaacgttctcgcgtaaaacaaccggttcattcttcaaatagttgtagtaaatgccgcgtggttcgaattgatcaatgaggatgccagcgggtttttcgggttggattttttggaggactttgaggagtgcgaaattatggctgatggccttcattttttcgatgttcattgtggcgtgtacttcattgtatttcggtggcatgatgttgacgatgtgataggggagtttagccatcatcttgattgccatctgatcgatttgtgcatcggttagcgttttggaatccgcgacgcctagactattgacgaacgccagattttcttggctgacatagacggcggcgatggtcagcggaccgaagtagcttccgttaccaacttcatctgagcctaaaacggaccatttggcaaaatcagctggtaaaacatcgcctttggcggctttaggcttagtacggctagcagattttgctttgctaggggtagcggtgccccacttagcagcttctcgttcggcactagcgccttggaaaagtactttgccagatttatagccggtaatgcttagtccattggcttggtgcgcaaaaacggcccccggcggtagttgacggttggttggataatttttttgaatagtagttaattgtgagggtgtcactttaatgactgcttgcatacgattggctccttaatgagtggcaaatgaagagattcggagtaaaattgccactttcccttatttcatgataaaatagttcagttgaactagcaaataaaattagagtgcgactgcagatggtcatactctgagggttagttgcataccgtgaatgaccggcaaggccgatcgtttgcggtatgaaactaaccggaagagtatatctgcaggagtacgttaaaaaaagagtgcgacagcaggcggttatattttgagtattaactggatttgacgaattggcgatgcaatcgccgatttggcaaatttggttaagcgcagaaatatgcctgcaagagcacgtttcaaaaatcagagtgcgcaataagctgggtatcttctgaggattagcatagactcgtgaataagcgacgaagtcgattgtttgcgaggcgtagctaaccggaagaagatggcttatggagcacgtttcagaatactttatccaatcaatcatacacacatccgcgccacaaaacgcgtatctaaggggaactcatgttaagtctaattattatcttaatgctgttatatgccatttacacaggggtcagacgggggtttatcatgcaagccgtctacacgattggctactttatcgtcttttggattgccaaagcgatgagccaaacactagggcctaagctaagtttaatggtgccatacccatcggcaactgaagacagctattttgcatttttccaaaagagtatcgggttatcactcgatgatgcgttttatatcggcgtcgcctttgtcctcgtgatgtttatcggtggcttgttggtgcgcttcatcggactattgttgaattcattgacttatatgccaggtttgaagcaatttaacaaggtagccggtggacttttgagtttcttggtcgtttacgtggggctctttttgctcctctacgtgctggctttagtgccagtcgatggcttacagaagacattggaaaactcgacagttgcgcgcgtcattgtcttacacacaccagtcctcacctctcaagtgacgagctggtggattgctggctaaaatggatagtgcagttggggctgacggaagtcgccccttttttagaaggagctaacttaaatgaatcataaaatattacaaacactagaatacgataaaattaaacaaatgcttcaaggccatgccatcacggcgtttggtcaagaacaaatcacacaattaacccccgctaacgatgcggaattgattcaagaacgcttggaccagaccaaagatggggtcgatattgaacggctaaaaggtggcattcctttgccacagttagataatattcgtccgcacctgaaacgaatcgaaatcggtgcgactttaaacggtaccgaactcgcgcaagttgggcgggttttacgtgcgacttctgcggttgtgcgtttctttgatgacttagaaaaagatgaattaaccttaaaggcgttgccagacttagttgcccaattggtgactttaccgcaactaactgaaaagattagaagttctgttgctgatgatggcgccgttttagacacggcttcaaccaagttgcgtggcttacggactagtttaaaacaattggaaggccaaatcagatcgcggatggcaagttatacacatggtgctaaagctaaatatctgagtgattcgattgtcacgattcggaatgaccgctatgtcattcctgttaagcaagaataccgtggccaattcggcggcgttgtgcatgatcagagtgctagtggtcagacccttttcatggaaccacaagccctcatggaattgaataaccgcttgcgccaattacaaattgaagaacaacaagaaattgaacggattttggcggaattatcggaagccatcatgccagaacgccacaatattttagccaacgctgaattattggggcaactcgattttgtcaatgctaaggctcaacttgctaaagcgttgaaggccactgaaccgctgattaatttagaaaaccatgttgaactcaaacaagcacggcacccattaatcgacccagctaaagtcgttgctaatgacatcgcgattggggcggattatcaggccatcgttgttacgggtcccaataccggtgggaaaaccatcacgttgaaaacattgggcttagtccaagtgatggcacaatctggtttatttatcactgcgcgtgaagagagccaagtcggcgtcttctcggatatttttgctgatattggtgatgaacaatcaattgaacagaacttgagtacgttctcagcgcacatggaaaatatcattcagattcttcaacatatcgatgatcgtagtttggtcttgctcgatgaattgggggcagggactgatccacaagaaggggcggctttagccatcgctatcttggatcaaattgggattgttggcgctgatgtcgttgcttcaacccattatccagaattgaaaatttacggttacaatcggccacaaacgattaatgctagcatggaattcgatattgctaccttacaaccaacgtaccgtttattaattggggtgcctggtcgtagtaatgcgttcgatatttcaacacgacttggtttaccaagtacaatcgtccaacaagccaaacaattgatgaacgatgaaagccaagatttaaacaatatgattaccgatctcgaaaatcaacgtaaggcagccgaaacggaataccaagccttgcgccatgaattatcagaagccactgatttacatcaacagttatccaacgcttatcaacaattcttcgaagaccgtgaaacagaaatgacgaaggcgaaagaaaaagcgaatgcaatcgtcgaaaaagctgaagttaaagcagacaaagtgatcaccaagttgcgggatatgcagatgaatcaaggcgcccagattaaggaaaatcaattaatcgatgcgaagtcggaattagggcaattgcaccaagaaacaaccttgaagaaaaacaaagtattgcaacgggcaaaacgacgtcaaacccttaaagaaggcgatgatgttttagttacttcatacggtcaacgtgggacattagtccggcaaatcgatgccaagaactgggaagttcaaatgggcattatcaagatgaagattgctaatgaagacctcgagaaacaaaaagtcgttgaagataatcgacctcaacgacacgtgacaactgtcaacagcggtggagcgcggcatgttaaagcccaacttgatttgcggggcaaacgctacgaagaagcaatggctgaagtcgatcaatatgtcgatgcggccttgttagcgaactaccaacaagtgacaatcgtccatggaaaaggcaccggtgcaatccgccaaggtgtccaggactacctaaaaggcaatcgccaagtcaaaaaatacgaatacgccccagcaaacgcaggcggtaatggcgcaacaatcgtaacattcaaatagagtgcggaagcaggcagttatacgccgaggattagcataggcagccgaatgaccaacttgttggtcgtgtggctggtgtagctaaccggaggagtatgcctgctggagcacgtttacgcccccaatccaaccagtcctttctggttttgagtgggagtgtttttttaggcttgttaaattaaacggggatgaaatagtccgtttgtaacgaataataagcgagttaagttgttatttacgccatataggagtattataaaaaataatatgttttgtacaattgaatggagggcgaagaataatggttgaagtattgacagataaaaattacgaagaagaaacaaagagtggcgttgtcttgacagacttctgggcaacttggtgtggtccttgtcggatgcaatcacctgttatcgaatcattggcagaaactaacgacaaagttaagttcagtaaaatggatgtggatgctaatccagaaacgcctgctaatttcggaattatggcgattccaacgttagtggttaaaaaagatggtcaagttgttgaaaaaattactggcttccataataaggaacaactagaaacgattttggcacaatataccgactaattatgaaaacacctactattcagtaggtgctttttttatgtgacagcgtgtgacaaaaatgttagtggttgtttaataaacgttgtggtaactttaatgatgaacaaaatgatgaaaatcaaaaagagagagaaagagatggtgaaaaaatgggtcaaaaaatacttaatttttggaataaaccggccgtcaatttcattggcaaaaccataatttattttgttattctgctaattctactttatttatatgattacagtggtatcggtagtcctaaatttatctacaatgaattctaatgaaggagcgtcgttaaaatgaaaaagaatatcattcaacaaattgatgcaattgcaattgaccaaccacaaactgtggcttatcaattaggcacggcgcaacacacttacgccgacttaaaggctgcttcagaccggattgctcatttcattcaaagccaagacttgccagctaaagcaccggtgattatcttcggtggtcaaaacttcgagatggtggcaacttttctaggtgctgttaaagcaggccattcttatattccagtggaacaacattcagatccagcgcggattaaacagattgaatcagtcgcaacgccggctgctgtcctatcatgggctagtgaaacaacaattgatgttaatatgcccgttttcgcagaaacccaattgacagatgtgattgcaaacggagcaaccgattatgatgctagccaaagtgtgcaagggaatgagaatttctacatcatcttcacgtcagggacaacagggttacctaaaggcgtccaaatcagcgaaagcaatttacaaagtttcgttgactgggccaacccagctttcaacgttgcggataacagccgcgttctaattcaggccccatactcattcgatttatcagtcatggatttatttcccgggttatgctcaggtgcaaccctcgtcgttttagaaaaagctgtgacggacaacttcaagacgttatttgaagtcttgccaactcttaaggtgaacgaatgggtttcaacaccatcttttgcagaaatctgcttattatcaccaacatttgatagtgaacatttcccagaattaaaacaattcgtcttctgtggggaagaattaacgcatcaaacagcaacgaagttaatcgaacgtttcggtgatgcgcaaatcttcaatacttacggtccaaccgaagcaacggttgcgatgaccagcatcgaaattacggcggaggtcttagcgacttacgaccgactaccaatcggctacacaaaggctgatactcaaactgtcgtagtggacgaacaaaataatccagtcgcagttggccaacctggtgaactcttaatcagtggcccaagtgtttcaaaagggtacttgaataatcctgaaaaaacagctgcagccttcttcgaaaaagacgggcaacgtttctaccattcaggcgatttggtcacccaaaacgaagatggcttgctcttttataaagggcggaccgacttccaagttaagatgcacggttaccggattgaactagaggaaatcgatcatcacttaagccaattagcagccgttcatcaagcatgtactgtaccgcgctacaacaaagcccatcaagtcacccaattgattgcctatgttgtgccagcagacggtcaagaagcgggcaatgatttaacgaagacgttaaaagcagaactcgctgaaaatacgatggactatatgattccgcaacgatttgtttatcaagaaaaattaccattatccgtcaatgggaagattgatcgtaaagcgttgattaaagaggttaatggcaatgcttaatttacaaccgtacgcgaatccgaactactttctcattctaggtgcggcgttaattccgttagtgattggcttacttaacggcaaacgttggcatgtttatgagacacttgtctcactgctctttttgatcctaatctttgacggggataaggttcaccagggaattgccttgattggttatgtcctgttcgaaggagcactgatttggggatacactgtctatcgtcaaaagcacaacaacacctggctattcgatctggctgttatcttagcgattatgccgctagtgattgtcaagttcgtgccattcttaaatccgggtagtaattcaattcttggcttcttggggatcagttatctgacatttaagtcagttgggatgattatggaaacccgtgatggcagtattaagaaatttgaaccatggttattcttacaatttatgctatttttcccgacgatttcatcaggaccaattgaccgttatcgtcgtttcaaaaaagattacctaaaagttcctgatcgtgaccattatctcgacttactgggcaaggcagtccacaacttcatgttgggctttgtgtataagtttatgctcggttacttattcgggaccgtgttactccctaaagttgcgcatttagcaatggcgagtcgcggtgggttccttgatatctcatgggggcttgttggttacatgtatgtttacagtatgtatttattcttcgattttgcgggctacagtttattcgctgttgcgacaagttatgtgatgggtgttgaaacgccaattaactttaacaagccatttgcatcaaccaatatcaaggaattctggaatagatggcatatgacattatcattctggtttagagattacatctacatgcgcttagtgttcttcttgatgaaacataagattaccaagaacaaggtcctcattgccaatctcggctatttaacactcttcttattgatgggcttctggcatgggttaacatggtactacattgtttacggcttgttccacgctatctggatcatccttaccgatgtctggttgcgtttcaagaagaaacacaaggatcacattatcagcaatcggtggacgaactacttagcaatttttgcaacgtttaacaccgtttgtctcagttttctaattttctcaggctttttggaccggttatggttccactaagacctacacactaaaggagcgatttaatcatggacgtagaaaatacagtagtagaaattttagcagatttaacagggaacgacgatattaaagacgatatggatatggaattattcgaatcagggacattagattcaatggcaactgtgcaaatgttacttgaattacaaggccaattagatattgaagtacctgtttcagaattcgatcgtgaagcatggtcaacacctaacaagatcattgctcgcgtaaaggaattgcaataaaatgtttaaacgtttatggcaaattttcggcccggttttagtggccggtctctgcttaacagccttattactatcacctcttcgattaggacgacctagcgaaaagacgttgtcgacagcggcgacgtcattatccgccaatgtgctaaaaggggaagccatcaaagatgctgcatttaacgacaactacattccgatgattggttcatccgaactatcccgaatggacgcgttacatccatctgttatggcaaacaagtatgattggcaaaataagccattcctactaggggcaccagggactcagtcattgacccactttttatcacttcaagcgactggtaatcacttgaacggtaaaaaggccgtcgtcgttatttcgccacaatggtttgtaccacaaggggtaaaacctgagatgttcgatttcttctattcaccactacaaaccagttatttcttaatccacgcgaaggattctgaaagtacgcggtatgcagcgaaacgaattctagaactcacaagtgatacaaccaacggggtaatgcgggatgcattgaagaacaaagctttaggcatacctttaacggagacgcaaaaagtatacattaataatgtgaaacgcccagcgttacaacatcaagatcaactcttcagccaattattcattcggggtcgtgaacgcgaattgcgtaaaggcttgaaggtgttaccaaaacaacctgataacatgcaacttgatcaagtcgcaacggaattaggacaaaaagtaacgggtgataatccgtttggcattcaaaatagtttttacaaaaaacgggttaaacccaatgttggtaaattgaagggtgaacaaagtcactttaactatgaaagttcacctgagtttgctgatttccaattgatgttagactacttcgcagcccataaagtatctgttcaattcatcattccacccgttaatgcgcgttgggccgcttatacagggctctcacaagcgatgttgaatcgttttgataagaagattcaatatcaattgagaacgcaaggcttcaacaacattgttgatatgactaacgacggtaatgaacaattcttcatgcaagatacgattcatcttggctggcgtggctggttgaaagttgatcaaaaactccaaccattcatgagaacgaaaaaagcaaaagcagtgcactatgacatgtcaaacgacttcttaagtcgcgactggcaaaacgtcagcggcaataacgtccatgactttgattagagtgagacagagccggttatcacttgaggattaacacagaacggtgaatgatagcgaagcaatcatttgacgttcggggttaaccggaaagagatggctcaaggaacacgtttagattagagtgagacagagccggttatcacttgaggattaacacgtttaatatgctaagtattcaaaaagggtaggaacaaaatttaattttgttcctaccctttttttatagcacatgcttatctgtgttttctatgcatttctcgtcgacttggtaagtctgccacgcgggttcttgtgtagtgtggtgtttcttcagaagttggcttgttttctggttccaccggttcaggaacaactggtgtttctggaacggattctggttctagtgtgggagcagccacttcttcaggggctgcttcaacaggttgtgtcatcacaggtgctggttcttcttcaacagattctgattcacttggtacagatgcgacttgtgatgcatcaaccgttaaatgaatggcttcgactgcttcgtcttcaattggtgcttttgaatctgtttggacgaaaatcgttacgttttttttattttcaatggttgctttggcttcagtcacaatccgcaattgttgttcgaggatttgggcaatgaagccggcttctaattggaagtcaggagtatcgaaatccgcaatccgtgaagcgacaatcgggcctgttaattcgaagaagtattgttccttcttctgtttcttaagactgagatggccgaagttgatttgttcgaagaaggcacagaggtcttcgaaagaatcgagtgggaattgcaaagcgagttgcttaccggcccaatagctgatggcatcattttcggccccaagaattgatggtaacaagatatcccgtaatgttgcctgtgtcagatatgatgcagtttgtggattttgggcgagttgttcatagcgtgattgagtcacagtggcactcctttatggttcgttttttataagtactcctattataccgcgaaaactctttattttttataaaaattaacgccaactgtgaattgccggccgtgcccgttgttttagttgaattttgcaccgaaaaaagagaaaatagaagttacgagtgtatcctgaaatgaaaagagaaatctaatatgcaaaaacaacccattggttttatggattcaggtgtggggggcctaaccctcttaaaagaggcgcttaaacgtctacccaacgaagacatggtctttatcggggatcaagcgcgcctaccatatggtgaaaagccggcggaaaccgtgcgcaaatttgcgtggcagatgaccaattttctacgggggcaaaatattaaagcattggttgtcgcctgtaataccgcaacggcggccgccttacctgatttacaagcgcaattgacgattcctgtaatcggtgtgattgcaccaggtagccaagcggcattggcaacgacccgtaatcggcatgtcggggtaattgccacgaccggaacgattaacagtggcgcatatgcctatcaactaaaggcactcaaaccggcgacacacgtcacgagtttggctgcgccaacttttgtaccgatgattgaagcaaaccaattgagtggcgaaactgtgcaaaacacggttgacgaaaccctcgcgccattaagcgggacgggaattgatacgctaattctcggctgtacccacttcccattattaaccgcggcgattcaaaagacagttggaccggcagtcacgctggttgaccccgcgcatgccgctgttgatagtttgattcaggcattacaagatcgcaatcagttggtggccgatgcaacagctgggcaactacacacctatacgaccggatctgtaaccaatttcgaagcaatcgcgcgtcaatggttagcaatcccaacccttgaagcccaacaagttatcattaaggaggaaaaaaacgatggtccgaatgaataatcgtgctgataatgatttacggccagtgcaagtcacttggcgttttctaaagcaacaacccgcttctgttctatggcaacgcggtgataccaaagtgctcgctgctgttcaacctacagaaggttccttgcaagtcaatggcaatggcataacagcgcaccaattagaatggttgcaaacgacattacgccccttattggcaaccgaagcactcactatcaccgtaacctgtcttgaagatggtggcggcttattagcagaactcttcaacgctgtttattgcgcactaaccttattaccaaaaggcaaaggccccaaacaagtcgctgcagccgtcacagcagcgatggtcgctggtgagtcactcggtgacccagacgccgcggaaagcgacctagcgactagcttggtgacgatggtggccacaccgcaggaacaaatcatcgcccttgaactcggcggacaacaagcagtcaatagtagtgaattcaacgaacttattttacgtgcgagccaaggtgtgacgcgaaccaatgatcaacgtcaagccagttttgaacgcgccgttcaaccgaatatccaagtggctgataccgatgaacaaacaatcgtgattgccacgaagaatccaggtaaggcccgcgaattcgaatccgtcttcgcagcggaagggattcaaatcaaaacattattagattacccagaattgccaaacattgatgaaactggttcgacatttgaagaaaatgctcgcctaaaggcggatcaaattgcagcgatcttacacttacctgtcttggcagatgattctggtctaatggttgatgaactaggtggtcgtccaggaatttattctgcacgcttctctggtgatcataacgatgccggcaacaacgcgaagttgctctatgaattaacgggtgtgcctgctgaaaagcggaccgcaaccttccatacaacattggtttttgctaaaccagaccgaccagatgaagatttagtcgttgaaggtaacgtgaagggccaaattctaggtattcctcgtggggataacggcttcggctatgacccacttttctacgtgccagaattagatgcaacgatggcccaactcacggtggaacaaaaaaataaaatcagccaccgcgcaaaagcaattgagaacctagaagataaatggaaagaatggatcaaagactagcgtgcgacggcaggatcacgtttagatttggctgatgtagctagccggaagaatatgtcggaagaagcacgtttcaaaaaaacaacgccccttggcgccgaaaggactgtttagtatgcgttttgttgttgtgagtgatagtcatggtgatcgcgatattctcgtgcagttagtggcgcagtatcaagatcaaccagtaaccatgttacattgcggggattctgaattaacaaccgatgatcccttgtttaaccaaatgaccattgtgcaaggcaatatggatttcaatggtcaatttccagcacaagttgttgtcccagttgcaaatgaacgaatcttcttaacgcacgggcacttgtatggtgtaaatggcgatttaatgcggcttttattagcggcccaagaaagccaagctaatctcgcgttctatgggcatacacaccaattggcctgtgaaatgcacgaaggtgtgctgctcttgaaccctggcagcattgcccaaccacgggggcagttccgtgacttgaaagggacatacgccgttgtagacgtcacacctgaccaatatcaaatccagtactacaatcgtcggttcgaacccgtttcgcagttacactttacatttaaacgcgcctaattctaaagactatccaaagtttagtagctatggatggtcttttgtgtttgctctttgttacaatctaaaagtagcattagtttattggaggccaagtgatgatttcagatgcattttcgaacttattattagaaaataaagaacacttcttaattcccggtgaggttgttgcgagtgttcaagaaagcaactccttggaacatgcgtttattctactaaccacggtgaaatattcgagcattcccgtcttagacaaccattcgaagttcaaagggatgttgacgatgccgttaattaccgagacgatgctcggattgaataacctcagtttcgaaaatttgcggaagctgaccgttaaagatgtcatgcaaaccgatgtcgtgacgattagagatccatatgatattgaagaaacgctccatctcttagttgatcacccctatctgcctgtgatttcggatgaaggggagttcacagggattgttacccggcgcgaaatgatgaaaagcttcaaccgagtagcccataatatcgaaaaagaataccaaatcgagccaataaccgcagaaacaacccaaaaaggacaataagggttaaaaaagcgtcttccagacaccaacgaataatgtttggaagacgctttttgttttggactgaatccagcttaattactggtatatcaacatttgtaagcaaaattaagttagacgtaatgactttaaaaaatccatgatagtaggtcataactcatgagttgtgaacctcttatatcgttacatattgttcttgggtaatgatggttagatgactaatattcacccctgcataggcattcttgggagtctagcctagggggaagtagtgataccgtcaaagttatgcctgatgaacatagtcaaaatatcgaaaaattatcatgtaacaaagttttaaaggcattagaactgggaggaaatttgatatgcaaaagagagtcgtccatctaattttagcaattattttcttaaccactacaatcgtacagtcatttggtagcgcattagcggtggctgtgaataaggagacggtgacagccaacacgacttctaagattgtgaacccacgaagcgcaattgaaggcgcgagctcagtttctgaaagcttagccagttcgttgcaatcacaatcgacaagcagtgcttcaacaagctcagatagtaagtcgagttcaaagagttctgattcagaatcgagttcaagtatttctgagaaaaaggaaagcgttaaatcgaccacgagtaaatcggtgattattcaatcacgatactggctttcagatttgactgatccgggcagtgaatatccagacttttcgattcctttatctggtcaaaacaacgttacaacgattgaagatgtagctaacattatttggagagttgtccgagcggccgaaggagcatgattggaaatcatgtaaatgggtctaacctgtttcgagggttcgaatccctcactctccgttaaataataaatgacatggcccgttggtcaagtggttaagacaccgccctttcacggcggtatcatgggttcaaatcccgtacgggtcatttttttggaggtttagctcagttgggagagcgtctgccttacaagcagagggtcacaggttcgagccctgtaacctccattcggtcgcatggtctagctggttaggacgcctgcctgtcacgcaggagatcacgggttcgagtcccgttgtgaccgtcttaaaaaaagcgtaagcaatttattgcttacgcttttttgttgtttaatcattttaattaaagacgccagtgattaatagcaagtatccaaactcttgtaaatagcagttacgtttgattaggccgagttgtaacgcaattaataataactggccacctgcaaagagaattaaatgccaaccgtgaattaaatgcgttaaaatcactgcaataataatgcacgcccatactacataactgaggatagtaatcatccgattgtgagtcgttagttcgagaagataaatgatgattaagaataggcctaattttacgagtaaatcctcggggataaagtgaatgccactgaaaatctgagtaattaaaaagaaaaatggggctagtaagaattgaaatgataaccgtaacgtacggtctttgaactggtctgggtagataaaagggattagaacaaaaatgctagtaatccctgatagaagcccaatcaaaggtagatcacgccagccgatgattgcggctagaataattgcgactaaaagggcagcagttgcaattattcgctttggtttataccggggtgataagacgagtaaaatggctaatagcgcccctagaatcgcagttagataaaatgaaagcccgaattgctttggaaaagaccacattgtcagcccgacgattaaaccgagatttaaataattaaacaaagtcagtaattgtggctgagttgaagcctttagatgttgttggttaaggtagaacaatagcaacacttctttcttagaatatgtgtctcatcttaactttttttgaaaagaaggtcaacggcttttgaaatggattgtattttgtgctaggatagtagagttataagaagttcccgataggattcacacaccgtgaagaggccttgtaaccgacacatatatagggggaaacatagaaatgcaagaaagacatttatttacttcggaatccgtttctgaaggccatccagataagattgcggatcaaattagtgatgccatcttagatgcgatgttagcacaagatccacaagcacgagttgcttgtgaaacaaccgttacaactgggttagtcctagttgtcggcgaaatttcaacaacggcatacgttgatatccaaaaagtggtcagagagactattaaagggattggttatcgtgatgggcattatggctttgatggcgataactgtgctgtgattgttgcacttgatgaacaatcacctgatattgcacaaggggtcgacgattcagttgaatctcgtgcaaaggatgaagatccacttgataagattggtgcgggggatcaagggttaatgtttgggtttgctgtcgatcagacaccagaactaatgccgttaccaattgccctttcacaccgtttaatgcgcaaagtcgctgagttaagaaagagcgggcaactcgcttatctaagaccagatgctaaggcgcaagtcactgttgaatacgacgaaaacgaacaacctgttcgtgtcgataccgtcgttatcagtacccaacacgatgcagatgtgactttagaaaccattcaaaaggatatgcttgaacaagcgattcaaaccgttattccagccaaatacttggatgatcaaaccaagtatttcattaatccaactggtcggtttgtcatcggtggaccacaaggcgattcaggtttaactggtcgtaagatcattgttgatacttacggcggttatgcacgtcatggtggcggtgctttctcagggaaagatgctactaaggttgaccgttcagcaagttatgcagcccgttacattgctaaaaacattgtagcggctgggttagcgcgcaagtgtgaagtgcaattggcctatgcaattggtgtagcgcaacccgtttctgtttcaataaatactttcgaaacagggaccgtcagtgaagaaaagattcaaactgcaattcgtgaaaactttgatttacgaccagcagggattattcaaatgttagatctacaaagacctatatacaagcaaacagctgcatatgggcactttgggcgtacagatgtcgaatttccatgggaacgtttagataaagtggatgccttaaaggcaagtattgctaaactaaatgcctaatgtattattagacgagtaaaagaggcggcctttccttagcttatttgagttaagaaaaggctctttttatgcccaagaataagagagggagctaagaatggaacaaagtaagggaagaaaaacgaatgtattactcgtgacgattgcgattttcgtcgcaactttcatgacagccattgaagggacgattgtttcaacggcaatgccaaccatcattagtaatttacacggtatgaaattgatgaactgggtcttttcaatctacctattaacgaatgcgatgatgacgccaatctatggtaagatggcagatcggattgggcgtaaaccaatcttcatctttggtttggccttgtttgtcatcggatcatccttatgtggattgtcaaatcatatggggacgttaattatttcccgggcaattcaaggcttgggagccggggcgattatgccggtatcatttacgattattgctgatatttatccgattgaaaaacgggcgaaagtcttgggttttaatgggtcagcatgggggattgcctccatcattgcgccgcttttagggggcttcattgttgataagttgacctggcattggattttcttcatcaatgtaccgattgggattattacgattggtttaatctggtacttccttcaagaagagaagaagacgagtgctgaaccagtcgactattggggcagtttatggttgatggcggcccttttgagtttactatatggcttccaagtcatgggtgaagccaaaccgtcagtgctcgttttagggtcaatgctcgtgattgcagtggttgctttttacctctttatccgcgttgaaaaacatgcacaagatccgattatctcattatcattatttaaaaatcgaacatttgttgtccaaaatgcagtggctgctttagtgagtggtttcttaattggttttgaagtctatatgccaatgtggatgcaagggatcctcggattgaaagcctcgatggggggctttgttgtgacgcctagttctgtgatgtggatttttgcctcattatgggcaggcctattacttgttaagcacgcaccacgaacaattctagccggtagtttgtgtattttacttgttgggagcttcatcttagcattggtcccacaaaccacaccgttttggttcttcttattagttgctgttggtttagggattggctttggcttaatcattaccacgacgactgttacggcacaaagcgttgctggtgctgacaaagttggtgttgcaacgtcgtttaatacgttaagtcgaactttaggtcaaaccttgatggtttcagtttatgggattattttgaatcggcaattggcaaaagggattgctggtgatggtcgattagatcaaaacatgttaaatgaattgattaatccagaaactgctttgaacttacctaaacaattattaccaacattacgccatattctatacaatggtttacacttcatttattttgcgtcaattgtgttaattgccattgcaattattattaatttaatggatcgtaaaagaagtaaataaaaaagattgaccaatacggtcaatcttttttattttaatggaataagacacagacgccttcaggtgtttttaagtctttttgacaggcggttaataaaccagtttgggcatcgcgccgataaagcgtaccattatcactattttggttaacggctaatagaaaatcgtcgttagcggaaagattgaagtcacgggggaattcaccatccgttgacatttgttggattgctcgtagttggcgactgtcatcactgatggcatacacaacgattgaattatacccacggttggaagcataaaggaaacgaccgtctttggaaacacggattgcagcgccgccgtttgcttcgtgccaatctgcaggtaacattgagtaggtagcaaccgcgctaaaagtcccatcggctgcatgataatctaagaccgtcacttcactggacaattcacccaataggtaagctgtcttgtgattgggatggaagattaaatgccgtgtgccaaaaccaggttcactcttgtaaattgctactttggttaattgaccagcattgtcgacggcataagttactaattcatcggtgcccaaatcacagaccactaagcggtggtcaggtgttaggtcggtataatgtacgtgggcgctagcttgttcaggacgcggaccgtggccttcatgaactgtcgtgctcgctaaggttaaactgccatcggcttggatttgataaacgagtatttcgcctttatggtaattggctgcataaacgagttggcggtcttcatcgactgccacgtatgctggtggtgcgccggctgctaagaccgcgttcaaaaagacaggggtgccactagctaagtcataggcagcaatcccaccttggtccccatctttaatgacggtgtagaggatgttgcggtttgaaatcgttaaataggatgcgttatcgagattaatgaatggttgaatgtcacttacggttgcagttgttgcatcgaaaattccgcggtagattcctttaccaatccggcgggtataaccaccaattaaaacttcttctgtcataatcagactcccttcgtcaaatactctttgagtatagcatattcctgcgaaaacggtttaatttgttactaaaaggattcactagtcgctaaaactaagtcgcgaatatgctacaatgatactatcttaactaagaggagatttcattatgaacacgcaagcagaagtcatttcaattggcaacgacgccattgatgatcaagaaccgatggtcattttattcgatgaacatgcgacaactgccattcaaaacgtggcattgattcaacattttatggacgaagcggccaaaaaacagctaacactgacgacagattctacggttattattaatcaacaaccttatacgattacgtatgtgggcgcgttggtaaatcctaacctcaacagtattggacatgtcgctttagtttttggacctgcgccacaagaagatcaactgcaaagtgggctttatttaacgccagctgccgccggtgttccggctgttcctgaattcaaagtaggaacgcagataacgtatcaagaaactatgtaggaattaggtgaattggtgtgacagagaataaacagccacaaatagaacgttcatggttctttaaatggtttttaaataagaagctaccgattgttttgttaaacgtgttattaacgttgctgattatacttttattaacaaaacttgcttggctgttaaaaccaattcagtcgttgatgttgattatcgggttaccgattattattgcggccgtcttgtattacttgaccaacccgttaattgattggtttgaacggcgttggcatttaaatcgggtattgtcgattacgattatttttattttaattgttggcttactggtctggggaattgcgacgattattccaatcattcaatcccagacaacgagtttaattgatcagtggccgtcttattgggcgaatattcaaactcagacgatgaaatggtttaacgacccagccttcaaatcgattcaaaaacaattaaacgatatcaatacggatgtgtttagtaatttatcaagtaaagtaaataaaatgctgacttcgaccgttagtcatattggaacagcggtcggagtggtgacgaacgtagtcatcgcgattgtaacgatgccgttcattttattcttcatgttaaaagatggtcaccgaatgaaaggctatttgttaaaattcttcccggttaaagtacgcgccacaactgggaaagtgttggaagaaattaacacacaggtcagtcagtacatccgcggccaattgacagtagcgttttgggttgcagtcatgtttactgtaggctactggattgttgggatgaagtacgggttgacgttgggaattttagcggggattttaaacttaattccgtatttaggctctttcctagcgatggtcccgtcagtgattattgcagcgtttatctcgccgttattattgattaaagtactcatcgtgtttgctgttgaacagaccttggaaggtcgtttagtttccccattggtcttggggagcaagatggcaatgtatccggtcacgacaatcattgtgttgctggcttcaggaaagttattcggccttgccggtgtgattctcggtattccagtatatgcgattatcaagatattaattagtcacctttttgaatggttcaagtcagtttcaggcttatacgagcaataaaaaacgcacgatccgtaataaatgcggatcgtgcgttttttggtttttagagcgttaatttcatgtagtggtgggggatgcccgcttccatttcgccttcgcttgtgacaataaagcctaatttttcgtagaaaccaatggcgtggtcctgtgcgaataaaataatataaggcgttgtggtgcgtttagcgtcttcaatgatggcttcgattaattgatagccgagtccttggccacggaaagctttgatggtagcaacgcgctgaattctaaatccaccgtcttttaagacgtgcacgcgtgcggttactgctgggtcttgattgaggtaacctacatagtgaatcgtgtgatcttcgtgcgcatcgatttcctgggtttccggcatattttgttctcggacaaacaccgttcttctaatgtatgttgcatcacgaaagataacactgttatctccaagtgtatgtttaatatccatttgtttcacacccttttctgatcaatgtagacgctaaggttaaaagcgacacgggtaattatacagttgtttcaagtcggattcaaccatttcagagaagtttttaggtacctaactaaaaagagccaaactaccgatttaaaaggtagtctggctcttttaactgctttttaaagcatgtcaccattaaaaattgaatggcgaacaagaacgtaatcgactttcttcaatgatgataagcgtttaccaccagcataagaaatcgatgattgtaagtcttggcgcatttcggtgagcgtgtcactaatcgcacctttataaggcactaaaatgcgtttaccctcgacgttttggtgtgtgcctttttggaattctgaagctgacccgaaatattctttgaattgttgaccatcttcttcgactaatttgccaggtgattcagcgtgtcctgcaaagagggacccaatcatcaccatgctagcgccaaaacggattgatttagcgatgtcaccgttggttcgaattcccccatcggcaatcatcggcttggtagcagctttcgcgcaccatctgagggctgccagttgccaaccaccagtcccaaagccggtcttgattttggtgatgcaaactttaccagggccaatcccgactttggttgcgtctgcacctgcgcgttccaaatcgcgaacggcttcaggggtaccaacattgccggcaatgacgaaactcttaggcagtacttttttgatatgttgaatcatatcgatcacgacttgtgagtggccgtgggcgatatcgattgtaatgtattctggtagtaagttatcggttgcgagttgattaataaagtcgaattcatcgtctttaaccccgacactgattgaggcaaataagccgcgctcgtgcatcatcttgatgaatgcgggacgcttttcaggctgaaatcgatgcatgacgtagaagtaatggttttcggcaagccagatggcaagcggttcatcaataatcgtctgcatgttagcagggacgactgggattttaaacgtttctgagccaaagcggacgctagtatcaatctcgctccgacttttcacaatacatttattgggaatcagttgaacatcttcgtaatcaaatacgtccattgggaattctccttaaaaacgaacatttattttgggtaacacggaatttatccgtgcataacgtataataacgagcttttttatgaaagtcaaataaaaaacacattcgaacccaaagaatgggagaatgtgtttgatgatagtggccttttgtaagttaaacgagttctaatccgcaggagctggcacacgctctatttaatgtaccgcttgcgccagaagcgatagactagcacaccagaaatgatcagggaaatgaataaagtaatcaaccaacttgttttggagcgagacagtggaaggtccacgttcatcccgtaaaaactaaatactaatccggggatggtgagaataattgaataagatgccaagaacttcataacactattcatgttattattaataattgacgagtaagtatcggctgtttcgttaataattgtgttggaaatttctgccatttcgatggcttgttgattttcaatctgaatatcatcaagcaattcaatttcatcttcattaagatctaacatattggtccgcattaaactagcgagtaccattttatcggtctttaaggacatcatgaaataaactaagccgcgttgaatggtcatcagatcgaagagttcttcattctgtagggaactctgcaagcgagtttcgatttgttcacgagagcggttgatgtcccgcaaatattggagatagatggatgaaatgcggaagagaatctggaggacacttctacggtgattttgtggattgaaacctttaatttggccatcaacaaagctctgtaaaaaggtgactggcgttttgttgatggttaagacggtcgaatctgttacaataattcctaagggacttgttttatagaggtatttatctggtttttgcgggtctttttcaagaattggtatgttgaaaataatcagggtcgcattataatcaggatcgtgctcagcacgcgcactttcatcagcatctaaactatagtagataaaatcagatgggatgtggagcttcttagtgagaagctcaatttcttcagtcgagggatcagttacgttaatccaactgttggactggattttagcatgtttggtgagctttttcttagcactgtcgaagcgataggtttcgagcatggtgtcacttccttcatcaataacttactgttaagtctactggatattttaagaatgtaaagtgcggtataaaagaagtgcgttcaaaccgggtatcctttgaggattagcctaattagacgaataagcggcgtagccgattgtttggctaatgtagctaaccggaacgggatgcttttgaaagcacgttaaatcaaggagaatcagaaatttgaaaaaaattgagttagccaagcagtttttaacgacgaacttggccgtattacaatgtccaatctgtcaggacgtatttgcaagtgtagccgagcaccaattactttgtgtcaatgggcatagttttgacctcgctaaaaatggcacgttatattttttagcaaagcaaatgaagtctgaatataccaaggaaatgttgcaacatcgccgggcttttttacaagcagggttctttcagccgttcttaaaagaaattgcatcacggattacccccgatagtttagtccttgatgtcggttgtggtgaaggaacgccagtgcaacagctcaatgcgcaagtttccgcgcgttatatcgggtttgatatttctaaacctgcgattcaattggcaagtgattacaatgccgatgcgtggttttgtgcagcagacttagcgcggatgccatttgctaatcaccagttagatacggtgctcaatatcttttcgccttcgcaatatcaagaatttaaacgtgtcttgaaaccgggcggtcaactaattaaggtgattcccaatgcgggttacttacatgagttacgggagttactgtatcatggtcaagctaaggaaagctatgatcatggtccggtcttagaattgtttgcgcaacattttccagattatcaagaaatgcaagttcaaaaaacaatgacgttaacacccgagacattgcgcgatttggtcgaaatgacgccattgacgtggacggcttctaaggcacaattagcggcaatcacgttagaagcgctacctgaaatttcattagatgtcacgattttagtgggaaaatgatgagaatttaaagaaagtttaaaaatctgattgcaactctaaaataagggcgctataatgtttttaaggaattttttccctaacttttatcagaatttattttgataaaagctagtgatgaaatgacactaacgtagtttctcgccgtgaataaccgagggactacgtttttttatttgcaaagcaaggtagagcttttgtgaattctattgtataattaatctactgaatcttttttaaggaagtttagaccgtgactaatcatattgtattatacgaaccactgattcctgccaataccggtaatattgcgcggacatgtgcaggaacagatactgttttagatttaatcgaaccattaggctttgaaaccgatgataaacatttaaaacgggctggtcttgattactgggaccaagttaagattaattatcacaagaacttggatgcctttttagcaactgtgcccgatcgtcaatatttatacttgattacgaagtttgctaagcaagcttattctgatcaagatgtgtcggatacaagtgttgatcattattttatgtttggtaaggaaacgaccggattacctgaaactttcatgcgtgaaaatgaagatcagtgtttacgaatcccaatgtccgaccatattcgagcattaaacctctcgaactgtgcggcattagtgatctttgaggcattgcgccaacaagattttccaggactcgaaaagagtcatttgtacgacaatgataaattaaaatagggagtgtttttgatgcaaacgaagaaagatccaattactgttgatgcttttcattatgaccgtgtttcacatgatgtagaaccacaacaaaatatccaagtcagcttagtcaccatcagcgaagaagatccatatttacaagaagctgatttgagcgcggggaatatttaccaaattgtgacgcctttccaagttgcaccagaaaagagtggctttgcagtgtcaggtcaaatttcacaagtggttcaactcttagatttctttggtgaaccaagtgaaattgatcaaaaagacatgatgaagctttcacgaccattgattgaatacatcgaaacattgacgtatcaagtgacggcggttgctttaaatcggggcgttcaactccaatttacagcgcaagccaacgaagactaatcagcgaaaggttgcggcaattttgccgtggccttttttagtaccgtgattaaaaacggtacgggactgacatttatgggtttagtagtacagatgttcgtgtataatggatagtaggatttaaggttgaaggagattttcatggccactaaaagtaaaaaaagaaaaccagcagcacgcaaaaagaaaaaacaacaaactgatttcacagttaacatcatcgggtttatttttattttaattagtttatttgcgggtttaaagctgggctttatcggcgggctttgcgctaacgtattccgtctgtttgttggcgatacattcattattagtgctattttattcgcccttttgggggtctatttgttgatttatggcaagcagccccccttatggcaccaaaagacgcttggatttgcaatcgcgtatctcgggattttaatttggttgtcagcattcgtcttgcaccatcaagcggtcaataaccatttcttggccgccacatggcagcttttattggaagacttccagaagatggccgttacgacggaagttggcgggggcttaattggcgccgcgttgtatggtgttttccacttcttgttcgcgcagatggggacttatctgattgccgtcttaattgtgattatcggcgtttttgttttcttagatattccattcagcgtcgttgttcagagtacacaacggtttgtgcatgggctctttaaagttggtggctacacgaaattagggttccaaaaggtctctgaaaaaggtaaagcgcaagtcagtgctttaaaagaacagacgcaaaaagctgttcaaaatgcaactgaacaagcagaagagacgtcagagactaaagagcaaatggtcgcaacggatggtccagaaaatgcaccgaagcaaaaattggaaccttttaaaataaacggtcccaaggatctaccaaaaccaattgcgacgcaagcagaaccaactgcacccgaaccggtggctgacgaagatgagcatgttccagatgtggcagaactcgcaccactgaacgagacggatgatgattacgaattgccaacaccagcattattaacgcaaattccggcgtctgatcagagtgcggaatataaagctatcgagaaaaatcaacaggtcttgaaacaaacatttgattcgtttggtgttgatgtgacggttaagagtgctagtctgggaccagccgtaacgaagtacgagattcaaccggcagttggggtgaaggtctctaaaattgttaacttagcggatgatttggcgcttgcattagcggcgaaggatattcggattgaagcaccaattccgggtaaaccgtatgtcgggattgaagtgccgaacacgaccgtttcgaccgtttcctttagagaaatgattgaacaagaacccccacatccaggcaaaccactcgctgtgccgttaggtaaagatatttcgggtaaggtcattatgtcggatttagccaagatgccgcatttattaatcgccggttcaaccgggagtgggaagtccgttgcaattaacgggattatcacaagtattttaatgagtgccaaaccacacgaagttaaattgatgttaatcgatccgaagatggtcgaattaaacgtctataatggggtgccacatctattgattcctgtcgtgacgaatgccaaaaaggcggctaacgctttgaacaaggttgtaaaagaaatggaacgacgttatcaattatttgccgatacaggtcagcggaatatgattgaatataatcagtatattcaaggccacaacgaagacggcgaaattaaaggcgcaccactgccttatatcgttgtcatcgtggacgaattatctgatttgatgatggttgccagcaacgaagtcgaaagtgcgattattcgtttggcacaaatggctcgggcggcggggattcacatgattgtcgctacccaacgcccatctgtcgatgttattactgggttgattaaggccaatattccatcgcggattgcgtttgctgtatccagtgggattgattcacggaccatcttagatggcagtggcgcggaaaaactgcttggccgtggtgatatgctttacatgccaatcgggatgagcaaaccattacgggtgcaaggcgccttcatttcgagtcaggatgtcgaaagtatcgtgtcgtttattaaagcacaacaaacggctgaatacgacgaagaaatgattccaaccactgagcaggaaaagcaatcaactgaagaaccagaagatgaatattaccaagaggcagtcgaattggtcgttaaacaacaaaccgctagtgtatcaatgctccaacgccgttttagagtcggctataaccgggctgcacgcttggttgatgagatggaaagccgtggtgtgattgggccatcagaaggtagtaagccacgcaaggtgttattacaaaacgtaccagaagaaccaacagaacaatagcgtgtgacataagtcgaatatcgcctaaaatggcgaataagcgcgtcagcgattgattgacattcaggattaactgaaaggcgctggctgatggaactcggttaaactattaaatgaaaaaggccgcgacaaaaaatacttttgtcgctgccttttttgagttcaccttctttttttggtatgatagaatccgtgctatgaaaaaggataagttgaaaagagccattttaactgttgaaacagtgaggagtaatataacgtgaatcagaaaataacggatggcgtctacctgaatattttacaaactaaccaatttaaaacaattagattgaccgttcaattaattgcccccgtcacagctgatgggatgacccggcgctcattattagcgagcgttctaggtgctagtagccaagcctatcgtgaccaggtcgcaattgcgaatgaattacaagccatgtatggtgccggctttaatatgaatgcctatcgacaaggaaacttggcgatttttagcatctcaatgcgaattgtgagcccccaatatctacgggatacaatcgacttgcaagagcaagcgattgcgtttatcgggcaattattattgcatccagatgtggttgatggccagttcaatccggtcatttttaaccgtgaaaaagagaacttagtgcggtatatcgaaagtgttgcggatgataagcaatcatatgcggcggttgaattacgcaaactctattttaaagatgcaacgcaacaaattcccaattatggggatgcagctgatttagcaaccatcataccggatgaactatatgcgtattatcaatcgatgattgcaaacgatcgggtccaaatgacgtttgtcggtaatatcgacgaagccaaaacggtcgcggatttggcacaattgccatttgcaccgcgtaatgttgaactgccaacgattttttatcaacaatcgttatatccacaagtgcaaactaaaacagaagtacaaacggtgcaacaaggcaagttaaacatggcctatcaaatgccagcttacttctatcaagctgattattatgccacaatggtgatgaacgccttattcggtggcacaccgctgtcgttactttttaccaatgtgcgtgaaaaagcgagtttagcctactatgcctcaagtgcaatcgatgcttttcggggtgtcattacggtacagactgggattgaaagtcgccaaaaagatcgcgtcttagagattatcgaagcccaacgtcaacggattatcgcgggtgactttgaacaggcggtctttgaacaaacgaagttggccttgattaatcaatttaaatcgagtctcgatagtgcggcctatttggggcaacaacaattcaatcgtttgtttgtacctgaaactgaaattgatgcagagcgatttacacaagccatcttggcggtttctaaacaagcggttcaagaacaagccgcaaagatgcaattgcaagccatttacttcctgaaaggggtcgatacagatgaagcttagacaaaatccccgcttaggtgaaaccctctatgaaactgaattagagaatggcttgaccgttaaaatataccctaagagcggttatcataagacatatgcaatcttaacgacgaattatggttcaatcgataagacgtttatcccagctggggaaacggattatgtgacagtgccagacgggattgcgcattttctggaacataaattatttgagaaaaaagattacgatgcgtttgaaaagtttggtcgctacggggcaagctcaaatgcgtttacgagttttacgcgaacgagttatttattttcaacaaccagtcacttgcgagaaaatttggatattctacttgattttgtgcaggaaccttatttttcaactgagacggtcgaaaaagaaaagggcatcattggccaagaaatccagatgtataatgatgaaccggattggcgcttattctatacagtgattggcaatctctatccgagtcatccagtgcggacggacattgctgggacggtggatagtattgcgcaaattacaccggaagcgctctatcaagcacatgcaacgttctatcagcctagtaatatgaacctctttatcgttgggcaaattgatgatccggatgaagtggttgattggttgaacgccaatcaagcggaaaaaacatttgcccaaccaacagaaattgtacgttcattgcctgaagaagctgaagatggtcatgatatcattccgtatcggtcacttgaaatgccaattacgcgtagcaagagcatggtcgggattaaaggtttaacggattacggaacaggtgagttagcacttgaaacaaagttgaagatgaacttgttacttgaattgctatttggtgattcatcaacgcaagtgcaaaagttgtacgatgatggcacacttgatgatagttttggttacgaatttgccattcaacggtcatttaattttgtgacccttggtggcgatgcggacaatgcccaagaattatcggatgcgattattaatatcttagaacatgccacggaaagtcctgacttttcagaggataacttggcgttggttaaaagagccgcaattggtgaatacttgcaagcgttcaattcgctagaagccattgcgaaccaatatagtgatgaattctttaccgaaatcagtccatttgatgtcttaggtttgatcgaacaagtgactttagcggacttgcaacagatggcaaccgattatttcaaaattgaaacgatgacagtctgccacatcttaccggagggagcaaaccatgcctaaatcagccttaattatcggtgcatccggtgatattgggatgacggttgcgactgaaatggcggcggacggttggtcgctttatttacactatcatcaaaatcagacgcgggttacgacgctgcaaaagcaattgttgcaagactacccaaaacaggatttttttgcgcttcaagctgatttaacccaagaggacgctgttgcaaaattgacaggccagctttttcaagtcgatgcggtcatttatacagcaggtgcgacgacgtatggcttattgccagaggtcagtgcaacggcactcgatcacttatggcaggtgcacgttaaagcaccaatgctattgatgcagcagctgcaagcgaaactagcgcaaagtccattaggacgcgtcgttttaattggttcaatctatggtggccggggcagtgcaatggaagtgccatatagtacagttaaaggcgcacaatccgcctttgtgaacgcctatgcacaggaagtggcatcgcttggaatcacaattaatgtggttgcaccaggcgcagttgatacgaaaatgaacaatcagttcacaacagcagaacgggctgctgttgtagcggagatcccggccggtgcttttgcaaccccagcacagattgcctattgggtattgagtttaatggcacctgcagccgattatatgacgggacagacattgtacgttaatggtggttggttaaaataaagaaatcttaataatgcacatacgtaccaatatgctataattatggataatgatactgggataatagtgggtggaattgattatgaatgaaattggtcaaaaattacgtgaagcacgaattgaaaagggctacacactcgatgatttacaacaaatcacaaaaatccaaaaacgatatttaatcgccattgaagagggcaattttgatgccttgcctggcagtttttacgtgcgggcatttatcaagcaatacgcccaaacagtgggcttagataatgatgcattgttggcagaataccaagatgctgtaccagatacgaaaccagaagaatatgttgaaaaatccgttgaaaatcaaacccgattgacgcgcgaaacaacagattctaaatggtcgaaatggcgcaaccttgtcccacaaattacgattgtggcaattgtggtcatcattattggggtggtctatgggattgcgctcagcaaccgtggtaaagaccgcgaaacgttaaacgaaacaagctcatcggttacggtttctggggataaaccagatcctaagaaggatagcagtagtgaagacaagtctgctgaaagcagtaagaaagccgcttctgaaagtaaggcacaagaagctagcaagaaagctgctgaagataaggctaagaagcaagaattaacggcgaagatgaccagcattaatgggtcacaacaagcttttgaaattaagaacttgccagctaaagccaaccaaattacgttctcagctgataaatcagctgcttgggtcagcttaacggccaatggccaacaaatttggcaaggttctgtcgcagttggtgccgaacaaactgctgaattacctgaaggcgttacgcaatttagtattcaaactgggaatgcacctgcaacgaagatgaagattaatggcaccgatattaaccttagtccaaataacgaagcaacgtttgtgcggacgattaatttcacagcaacattggctaaataaaggacattaaggagtcttcaacatgaatttaccaaataaattaacgatgtttcggattattttgattccgatttttactttgattttagtattggatgtgcctgcgacagccattatggtcgctgggacaagtattccagtcagtgcgattattgcaacagtgattttcattgtagcctctttgacggacttactagacggcaagattgcccgatcacaacatttggtgaccaacttcggtaagtttgctgatccattggctgataaattattagtgatgacagcatttatcttcttagtggcgctagatcaagcgccagcatgggtggttgcgattattatttggcgtgaattagccgttactggcctacgtttattattaagcgaaggtggcgaagtgatggccgcagctatgccaggtaagattaagacgacgacgcagatgttagcgattattctattgctactcaacaacgtcttctttaacaatatcggcattccaatggcacagatcatgttatacgtttgcttgttctttacagtttattcgggtaccgattatttcatcaagaacagaggcgtctttaaagactcattttctaaataaacttaaactggcggggaatcccacgccagtttttttaacccaaaaagcacgaaaaaaacgcggtgattcgggtatagtagagtagcttaaaaaatatatagaacgtttgttcgatttttacttgcttttatttcgtgaaatcggtaaactaagagagtactgaaaaggactcttttgaggagggcacttaattggctaaagatgaaagacaagcagccttagatgctgcattaaagaaaattgaaaagaattttggtaagggctcaatcatgcgaatgggtgaaaaggttgatacacaagtctcaactgtttcatctggttcccttgcattggatgaagcgctcggtgtaggtgggtatccacgtggccgaattgttgaaatttatggtcctgaaagttcaggtaaaacaaccgttgccttacatgctgttgccgaagtgcaaaagcaaggtgggactgctgcttatatcgatgctgaaaatgcaatggatcctaagtatgcaactgccctcggggttaatattgacgatttactcttgtcacaaccagatactggggaacaaggcttagaaatcgccgatgccttagtttcaagtggggctgttgatattttagttgtcgattcagtcgcagccttagtgcctcgtgctgaaatcgaaggcgaaatgggtgacgcgcatgttgggttacaagcccgcttgatgtcacaagccttacggaaattatcaggaacaatcaataaaacaaagacgattgcgttattcattaaccaaatccgtgaaaaagtcggcgtgatgttcgggaaccccgaagtcacacctggtggtcgcgcattgaaattctattcaaccgttcggcttgaagtccggcgtgctgaaaccatcaagaatgggaccgatatgatcgggaaccgtgcgcggattaaagtggttaagaataaggtggcaccaccatttaaagtggctgaagtcgacattatgtatggtcaagggatctcacaaacgggtgaactggtcgacatggcggtcgaaaaggacattattaataagagtgggtcatggtattcctatggggatgaacgcattggtcaaggacgtgagaacgcgaagaattacttggctgatcatccagaagttcaagatgaagtccggcttaaagttcgggaagcatatggtatttcggatgtcccagtagatgaaagcgatgaaacacaactcgacgtctttacggatgacgattcaaacgaataagaatcattaagctgaggcaaaagttattttgcttcagcttttttgattgcttaaccgaattattctgatggtcgatttgattgactgaactcgaaaacggttgcaatgccgatagtttaagttgacaggcggtttatgaaactataaaataactatgtgttgaaaaactaaacataataacatctttaaaaatttgcagtgaaagttgcaattcaaaatttttgatgatgcggaggtgaaacaatgaacttagcttttccattaatcctcgcagtcatcatgttaatcgttggtttactagttggttccgttctacaaaagaaggcgcacgaacgtgaaattgatggtgcaaataagactgccacaggaataatcgcagcagctgaaaaagaagccgcaacgcggaagaaagaaattcttttggaagcaagggatgaaaatcaccgctatcgttctgagattgaaaatgaattgaaagatcgacgcagtgaggtacaaaagcaagaaaaccgtttgattcaacgggaagaaacaatggatcgcaaagatgcaacgttggataaaaaagaacgttcattggagcaacgtgaaaatcgtttaacgaatcaagcacaagagctaactgaaaagcaggcagaagctgccactttagttgagcaacaaaaagcgaagttgcaagaaattgccgaattatcgcatgatgaagcgcaaaaaatcattttggatgaaacgaaacaagaccttgaacatgaacgggctgttttaatcaaagaaagtgaagaaacagctaaagaacaagctgatcggactgcgcgcacattagtcgctgaagctattcaacgcagtgcagcggatatggttgctgaaacaacagtaactgttgtgacgttaccaaatgatgatatgaagggccggattattggtcgtgaaggtcggaatatccggacattggaaacactgactgggattgacctgattatcgatgatacgccagaagcagttgtgcttagtgggtttgatccgattcgtcgcgaaattgcgcgcatgacattagagaagttaattcaagatggccggattcatccagctcggattgaagaaatggttgataagtcacgcaaggaaatggacgaacaaatcagacaaatcggtgaacaagcaatctttgatgttggtgtgcacacaatgcatcctgatttaatcaagattcttggtcgattacatttcagaacaagttacgggcaaaacgtcttgaatcattcaattgaagtggccaagttaacggggattttagccgctgaattgggtgaagatgtgacactcgctaaacgagctggcttgttacacgatatcggtaaggccctcgaccatgaagtcgatggctcccacgttgaaattggggttgaactagcaacgcgttataaggaaccggcaacggtgattaacgcaattggttcacaccatggtgatactgaagcaacatcgattatctcagtcttagtcgcagctgctgacgcgatttcagcggctcggccgggtgcacgttctgaatcacttgaaaactacattcaccgtcttgaaaaacttgaaagtattacgaatagttttaaaggtgttgatcatagttttgcgattcaagcgggtcgtgaagttcgggtgattgttaaaccagaacaagtcacagatgaccaagcaaccgtcttagcacgtgatgtgaagaatcaaattgagaaccaactcgagtatcctggccacattaaggtgactgtgattcgcgaaacaagaacggtcgaatacgcgaagtaatgcggattggcctaacattgaagcgggggacaaaaccaattttgttccccgctctttttttggttttaattaaaattgtggaggacattatcatgaaagaaggtgtgttattagttaatttggggaccccagataaaccagaagtcaaagaaattcgccattttttaaaacatttcttagctgatcagcgggtcgttgcgatgcccaaagcggtttggctccccattttatatggaccgattctgatggcgcggccgaaaaaagtgcgggcggcctaccgcaaaatctggacgacggctggtccccgttaaaagtgtacatgcaacagcaagttgctcaattacaagctgaattacccgattatcaagtttttgaggcgatgtcatatagtcaaccattcttaaccgatgtgcttagtgagattcaaacggcgggaatcgatgatttggcggtcgtgccaatgtattcgcaatattcaacgactacgacgatgtcgatttatgatgtagttgcgcagttttatttaaaacaatcaaacatgccaactttgcattttgtgaaggacttttatcaacgctcaggctatatcgacttgatggcaacggcgattgaacagaagctacagacgcaaacctatgacgaaattattttgtcataccatgggattccaaagtcgtacgtaacaaaaggggatccgtaccaagcacagtgtgaagcaactactgcgctattgcaggcgcgcttgcctaaacaaacttttcggaccacataccaatctaagtttggaccgaatgaatggctaacaccggcactagcactacgatgcagtcattagcccaagaaggcgttagaaaaattttggtcctaaccccgggctttgttgcggattgtttggaaactatcgaagagattgatgttgaaaatcgggactattttatggataatcaaggcgaacaatttgattacattcatccctttaatgctgatccacgatttacggccttattaacccagattgtgcgggacagataatcagggtgcttggcttttgcttaagaaatcaagtcattgttgtgtttaacgggtttgatttgtataataaagagaatgcaagagaaagtaggcaagttgaatgcaacccatgtttaaaattatagttggtctatttgcgacgatgctcgtatcggccgcaattaccccattagtgcgccgcctcgcgtttgttttaggcgcagttgataaaccaaatgcccgccgagtgaataaaaaggcgatgccggcaatgggtggtctggccatttttatcgcgtttacgtttgggaccttcgtattattacgcgggcaattccaaacacacgaacttttcagtatcttcttagcagaatgtatcatcatcatcactgggatgatcgatgatattaaggaattgaatccaaaggaaaagatgctcggtattttattagcagcattggtcatttatttcttagcgggcgtccgcatgaatattttgacaattccatttttaggcacctttgaactaggatggttaagcttcccaatcaccattttttggattctggcaattaccaacgccgttaatctgattgatgggttggatggcttagcaactggcgtttcgattatcgcactcttcacaatgggcgtcatcgcctatttcttcttatcaatcaccaatgtcagcgtctcaatcatgattttttgtttggtcgctgcattaatcggtttcttaccacataacttccatccagcgaagattttcttgggggataccggggccttattcattggttttatgattgcggtcttatcgctcaaaggtttaaaaaacgtgacgttcattacgttattgattccagttattattctcggtgtaccaattacggatacaatttacgcaatgttgcgccgaattttgaataaaaagcccatttcacaagcagataaacatcatttacaccatcgtttgatgcaacttggtttatcacatcgccaaacggttctcgtgatttatggactggcattggtcttctcgttgatttcattgctctacccactatcgacactctggggaagcttggcattgacggtagccgtcttaattggcttagaattatttgttgaatcaattgggttacttggtgacaatcgccgcccattattgatgcttttaaaacgattattaaaaccgaagaatgaagaaaaggattagccattggctaatccttttcttgcgttattggtagcgaatctggtgtaaatcctgtgcgctaatggggacttcgttgaattgttgagggccaaggtcgaattgtaattggccgttgaggcgttcggttaattgttgttgtaaatcactaactgctgtagtcgctaaccagacggtcatttgaatgttagtcgtatattggatgtcttcggcagtgaggtttaattggctaagtaaattttgcacagtgtcaaattgagcgtagtcaattgtaatctgacaagcggtttgttcgataccttggacaataccgaggtgttcaagtccggccgaagtggcgtgactgtatgctcgaataagaccaccagtaccaagtttgatgccaccaaaatagcgggtgacaacgacacacagattagtgagctgcatctggcgcagtacttctaacattggcacgccggctgtgccacttggctcgccatcgtcactttgtttttgaatattggccgttaaacctaattggtaggcgaaacaattatgattggccttcagatttgctttgcgaacttgtgcgatgaacgcttgtgctgcggtttcgtctgtgacacgcgcaacatgacagatgaagcgtgactttttgatttcgagttcaaattcgccgtctttttgaacggtaaaataactttgcataccggactccttgaaaaaataagctggatttaacggaactaaggatggaaggtgaaatgatggcaaaacaacttgcttatggtcgtcagtggagtgccacccaattgagtaccgttatgaataattatagtttaccacagattaaacagcgactagcgtttcaaatagttaatcagcgtctggtatgtcaacggtgtggacaagtggtgaaagagcaagctcgcttacctgatggtcggtattattgtgctgcttgcttgacctttgggcggttagtggaaggggatcagttggtttacgtgcctgaatgcaatctgtttgagtcgatcgtagaaccgctaacttggtcggggacactaaccccttttcaagcacaagccgcaaagcagattgttgcggtcattaccaagcaacaacgccatgtcttaactgcagtgaccggtgctggtaaaactgagatgttatttcaaggcattgcgacggctttagctaatgggcagcgtgtgtgtgttgctgcgccgcgggtggcggtttgtttagaactctatccgcgcttgcaagcagcgtttgctaacacaccaatcatgctgatgcatggggaacagactgcgccttaccggtatacgccgttagttgtttgtacaacccatcagttatttaagttttatcaggcatttgacactgtcattgtcgatgaggttgatgcgttcccatttgtcaataatccccagcttgagatggctgttaaacaggcgtgtaagccatgctgtgcattgatctatctgacggcgacaccaactgtaaagttgcgccatgcgattaatacaggggatttaacgggtagtgagctaccaattcgctttcatggtcacttattacctgaaccgcattgctatcccttgtttacgtggcggcgttcagttaaacggcatcagttaccatccgtgacgcgcaacttactcaggaagtgtcttcaagaacaacgcttattattatttgtgccacaggtaagggatttagaggcggttcagcagagcgttgttcgggcattgccacacattacagtgaacacggtacatgctggcgatcctaatcaattagacaagatagcggcctttagagcaggatgcggggacgtgctgattacgacgacagttctagaacgaggcgtaacgtttaaaaatattgcagtgtttgttcttggtgcagaacacgtggtcttcactgaatcagtgcttgtacagattgctggccgagccggacgacagcaagagcatgctgccaatccggtttattttttctacgcggattacacggtcgctattcagcgtgcgtgtcaacaaattaaacgacaaaatcgaaaaggacggcgattacaatccactgtttaatgtgtgcggcagttatccttgaacaaccctccattgcattgatttgttcattgcgaccagtctatccggcgatgatctgttcacgttgcatggcacagtttgaacggattgggccgcagtgttgttcgggatgtggtcggcaaatgacaacccagggggtgtgtccggattgccagagatggcagcaactgtatccaggcgaacaatttactaatcgagcgttgttaacatacaacgaaccaatgcaacagtattttcaacgctataaggggcagggggattatcgattacgtcacgtatttcaacggctgattcgagaaaattttcctgtgcaacggcaaacggcgtatatcccagtcccgactgatccaacacatttgcaaagccgcggattcaatccggtggttggcttatacgaggactgttttccactgaccccattgttgcagaagctaccaactgaaaaaggacaagcacaaaaaaatcgtgcagagcgcttagcaacgccgcaattttttaaatgcgcgcagaacgtgctgttgggttccaaggtgcagcagttaattttgttggatgatatttataccactgggcgcacgttatggcatgctcagcagtgtctccgcaagcgataccaaacgctgccaattcacgcaattactttagtccactaggaccatattatttgtgtgttacgcgcaaattatatataatgaagtcagtaacaaagcctcgggaaagaattgagttccgagcgacaagtgcccacagggggtatttgtgaaaggggagaattcatatgctaagttttaatgttcgtggtgaaaatattgaggtaactgacgcaattcggagttatgttgaaaagaaaatcagcaaactcgaaaaatatttcgatgattcagcgaccgcaactgcacacgttaatttaaaagtgtactccgataaaaccgctaaggtggaagtcaccattccattaccataccttgtattaagagcagaagaaacatcgcctgatatgtatggtagcgtcgacctagttactgataaattagaaagacaaattcgtaaatttaaaacaaagattaaccgtaaatcacgtgaacgcgggattaaaggtatggaattaacggtgccagaagcagaagcattaccagaagaatcaatgcaagtcgttcgaacaaaacgcgtttcattgaaaccaatggatagtgaagaagcaatcttacaaatgaatatgctaggccatgagttcttcatcttcgaagattcagaaacaaacggtacaagcattgtttataaacgtcaagatggtcgttacggtttgattgaaactgatgaataagtgaacgttaagttagggctgggacaacgatgagttgcgctcagccctttttttgtagccatatagataatggggttaaatttttactgaattggctggattgtttactgtgacagggttttatttgattgtaataaatggtaaaatgaattgttagtaatcatattgactatataagaaatcgctatttaagaactcaaacgtatttctagaggagaattgacgcacatggcaaactttctaaaaacatgggtagaaagcgataaacgtgaagtagcgcgaatgggcaaaattgccgatcaagttcaaagctatgaagatgaatatagtaatttatctgatgaagcgttgcaagctaagaccccagaattcaaaacaagattagcaaatggtgaaacattagacgatattttaccagaagcttttgcggttgcgcgtgaaggtgctaaacgtgttttagggttattcccgttccgtgtacaaattattggtgggattacgctacacgaaggtaacatcgctgaaatgaaaactggtgaagggaaaaccttaacggctaccatgcctgtttatttaaatgcattggctggtaaaggcgttcacgttgttaccgtcaacgaatacctttcaagtcgtgatgcaacggaaatgggtgaattatataactggctcggtctttctgttgggttaaacttaaatgctaagacaccagaagaaaaacgcgacgcatacaactcagatatcacttattcaacgaatagtgaacttgggtttgattacttgcgcgataacatggtggtttacaaagaagaaatggttcaacgaccattgaactttgccattgtcgatgaagtggattcaattttaattgatgaagcgcggacaccattgattatttctggtcaagctgaaaagtcaacagcactttatatccgtgctgatcgttttgttaaaactttaaaagaagaaactgactataagattgattggccaacaaagaccatcagtctaacagaatcagggattgaaaaagctgaggctaacttcggcttggacaatttatatgacactgaaaatacagccttgacgcatcatttggacgaatcattacgggccaactatatcatgttaaaagacattgattatgtggttcaagaaggcgaagtcctaattgttgaccaatttacaggtcgtgtgatggatggtcgtcgttattcagatggattacatcaagcgattgaagccaaagaaggcgttgaaatccaagatgaaaccaaaacaatggcgaatatcacataccaaaattattttagaatgtacaacaagttatcagggatgactgggacggcgaagaccgaagaagaagaattccgcgaaatttacaacatggaagttatctcaattccaactaaccgcccaattgcccgaatcgataaaccagatgtgctttatccaactttggaaagtaaatttaaggcggttattgaagatatcaaggaacgttatactaagggccaaccagtattggttgggaccgttgcggttgaatcttcagaattactatcgcgattactagatgaaaataacgtgccacacgctgttttgaatgctaagaatcactttaaagaagctgaaattatcatgaatgctggtcaacgtggtgcggtcactatcgctactaatatggctggtcgtgggactgatattaaattaggacctggtgtgacggatttaggcggtttggctgttattgggactgaacgtcatgaatcacgccggattgataaccaacttcgaggccgtgctggtcgtcaaggggatcctggtgtcacacaattctacatgtcattggaagatgacttgatgaaacgtttcggttcagaacggattaaagccttcctagaccggatgaagatttcagatgacgatgcggtgatccaaagtaagatgattacgcgtcaagttgaagccgcacaaaaacgggttgaagggaataactacgatacacgtaaacaaacccttcaatacgatgatgtgatgcgtgaacaacgtgaagtcatctataaacaacggatgcaggtcatcatggcggaagataatttgaaagaagttatcatgccaatgatttcaagaaccgttaaacggattgtgcaattgcatacacaaggtgaaatggggagctgggaattagaagcaatccacgcatttgccacaacttcaatggtcagtgaagaagaattaccaattgaaaaattacaaggtaagactgctgaagaaatcgaatcattattgatgacctttgcagaaaagaattacgcaacaaaacaaaaacaattagcagatgcagatcaaatgctcgaattcgaaaaagtcgttatcctccgtgtggtagatgaacgctggaccgatcatatcgatgcaatggatcaattacgcaactcaatcggattacggggctacggtcaaatgaatccattggttgaatatcaagaagaaggttaccggatgtttgaagaaatgatcagcgacatcgattacgatacaacccggctcttcatgaaggcggaaatccgtcaaaatattcgacgctaacgcgtagaaaatggctgaggtagttaacttagccattttttaatgggaaaaaatagtggagggactaaaatatggaattaagtgaagcaaaacatcttttagaagcaattgaagctaaaataacgcaatttagggggtcactttgacttagatggcctgcaagaaagcatcgcgcaaaatgaagcgcaaatggcggatcccgatttctggtcggatcaaaaagcagcccaacagttaattgatcaaaataacgccataaaggaaaaatacgacgcttttatgcaacttcaagcgcaatcagaagagctacaagtgacattagagctattacaagaagaacccgatgctgaactccagacgagttttgaagctgatttgacggctgttcaagttcagatgcaacaatatgaactcggacaattactatcgggcgactacgatagcaataacgcgattgttgaattgcatcctggtgctggtggtacggaatctcaggattggggttcaatgcttttgcggatgtacttacgctgggcagatgcacacggctttaccgttgaaacagaagattaccaggccggtgaagaagctgggattaagagtgtgaccttgatgattaaagggcacaacgcgtatggcatgttacgttctgaaaaaggggtccatcggcttgtacgaatttcaccgtttgattcagctgggcgccgccacacctcgttttgttcagtcgatgtgatgccggaattggatgattcgattgatatcgaagtccgcaccgaagacttacgaattgacgtcttccgttcaagcggggctggtgggcaacatatcaataaaacatcatcagccgtgcggttaacgcatttaccaactgggattgttgtttcatcacaggcgcaacggtcgcaattgcaaaaccgcgaaactgcgatgaatatgttgaaggctaaattgtatcaaaaagaacaagaagaacaggcgaaaaaagcggctgctattaagggcgaacagcttgaaattggctggggctcacagattcgctcatacgtattccatccgtacacgatggttaaagaccaccggaccgactacgaaaccggaaacgggcaagcagtcatggatggcgatttggatccatttatgtatgcctatctgcaatggcagttgagtcagaagaatcccgactagctgcaaagaaattgaaatataaatgtaatcaaattgtgattatttgaataaatagcatgctataatataaaagattgcggttttcattgacaataaataatgataacgacaaaaaaaggagtgtccccaattgattcgaatgacaaatgtgtcaaaaaagtatccaaatggcgtgacagcaattaaggatctttcgctaacgattgaacccggcgaatttgcttatattgttggtcccagtggtgctggtaaatcaacattcattaagatgttgtaccatcaattaaaagcaacgagtggtgaaatcgaagtcgctggttttgatttaatcggtatgaaggatcacgatgtcccatacttacgccgtaagatgggtgttgttttccaagatttcaagttattaccacgtttaacggtgtttgaaaacgtggcatacgccatggaagtgatcgaggcagaacctcaagcaatcaaagatcgtgtattagaagtgctcgaactagttggcttgaagggtgaaattcgtcgctttccaaatgaactttctggtggggaacaacaacgggtcgcggttgcacgtgcgattgtgaaccggccagatgtgttgattgccgatgaaccaacggggaatctagatcctgaaacgtcagatggtattatggatattttagaagcaattaatgaacgtgggacgattgtcttaatggcaacccataacaaacaaatggtgaacgaacggacccatcgcgtcttagcgattgaagacggtcgcttagttcgtgatgaaaaagaaggtgactacggctatgaagattagaacattgaagcgtcatatcaacgatagttttaagagtttaaaacgaaatggctggatgtcaatcgcagctgttagtgcagttaccgtaacgttgttattagtcgggattttctttgcgatgatcttcaactttaacaagatttcacaagatattgaaaatgatgtgcacgtgcgggttatgattgaacggggcacaacaagtaaacaaaaagatcagctacaaaagaaacttgaaaaaatggcgtctgttaaagaagtgacgtattcaagtcgtaaaaaggaattaaacaaggttgtcggcagttacggtcaatcatttaagatgtttaccggagacgataatccgttgtacgatgtttacacagtaagtacgacaaaaccaagtcaaacgattaaagtcgctaaacaagcgaaaaaattgaaatacgtttatgatgccacttatggtgggaacaacgctaagaagttgttcaaggtaatgagtagcgtccgtaaatggggcgttggttttactttattattgctctttgtggcagtgttcttgatttccaatacaattcggattacgattttatcgcggcgcgacgaaatcggaattatgcgtttagttggggcaactaactcgtatattcgctggccattcctttttgaaggggcttgggttggattacttggggtaattattcccattattgtaatcgacttaggttatggttgggtttaccgtcatatggcactcagcatggcttcagccggttattcaatgttgaaaccaggaattttcttattccaacttgatttaacaatggctgtgattgggattgtgattggggcattaggttctgtcatctcaatgcgtcgtttccttaaaatttaaactaaattagtgaaagagtggcgaacattaaattgttcgtcactcttttttttgaaccctaggcagttaagggggcaaaatgctatactgattgggataactgcgaaattcggcagctggaaatcgagcgtgtgtcgttggaaacacgcacggtatttaaatatagacgctgggggtttgttgaattgacgatgatcattgatattttgcgaccattactaacggcaccacttttatggttagcgattgtgtatgctggctggttagcgcatagacgaattagcttggaacggaagacctttagaattgcgattaatccacgatggatagaagtgggccattttgtgggccatgggctactcgcagggctagccttaagttgctgtaccttagtgttaggggcgatggttaatatgcaatggtggctggtctatcaactaatcgctattttgagtttgctagtggctgctagatggcaaaacgtatcggcaacctttttaatcagtgctttggtctacgctggtgcaacattcatatggccccaatatcagatggaaggtcaagcaagtcttttggctgaattattggtgattattgggttagtgaccgtcatcaatagtgttttacaacgttgggatgccgaggcaactgtgacaccgcgtgtgatgactagcaagcgagggcggttgacggccttctttatgagtcgacaaatttatattgcgccggtctttttcttagtgccaggggcaattgatatgccaagtttgggtttttggccggtcttaaatatcgggcatcaatcatatagcttggtaatcttgccattgttattgggatttagtttgaaagcagtcaaaggcttaatgaaatcagttgttactaaaaatgccaatagctatttgatctttggcttgttgttagttgggtttgggttaattgccgttgcatttccgaactggattattggcatgttaacagttgcgctagtactaagctgtgcattacaatggcggttgagtagacgcagtgcccatgaacggcagttgcactttacgaaaccctacgatggcgtctttatcttagggattttacgcgaaacgccggctgctaaaatggggttggtcgttggcgatacaattgttgaatgtaatggcgaggctgtctcaaataacgataatttttatcgggcgattcaaagtcagccaacgtattgccatttaaaggttcaagatttaaacggtgagttccggatggctgaaggcgcaatttttgctgatgcaccacatgagttaggcgttgtattattcccagagaattaagtaaataaagggtggcatgaatgaagacaattttagtggtagacgatgaaccagcaatcttgacattattacgctataacctggaacaagaacattttaaagtgatgacggcaactgacggtgcacaagcgctgacgatggctttacagcagtcgtttgattttattattttagatttaatgttgcctaagctagacggaattaccgttaccaagaagattcgggaggcaaagttaaaaacgccgattatgattctaacggctaaggatagcgaaaccgataaaattgtcggcctcgaagtgggggcagacgactatgtcactaaaccatttagtccacgcgaaattatcgcgcggattcgggcaattgaacggcggacggcacagcctgtagcagtcgttgaaacgcaccctagtgatattttacaagtaggggacttaatggtcgatgaaggcgaagttgtggctaaaaagggcactcagaagctccatttaacgcctaaggagttcgaactccttgtttactttatgcatcggattaacaaggttcaaagccgtgagaaactcttaaatgcggtgtggggctttgattatccagccgaaacgcgaatggttgatattcaagtcagtcatttacgggaaaaaatcgaaacagatccgcgtcatccagtttacttaaaaacggtgcgtggtttcggttatcaattggaggaccccaaccatgaccaaacatgatcaatttagattttatcagctagccactattttagtggctgtttacataggttttattgtgcttgtcaatttggtgattgcccaacaacaagacgcgatgttaaaggaacggggcgccgactatgcgctaatcatcaaacaaccacagtttgatcggcaaaagtggttacgccaaaacggcttacaagttttgacgccaaaatcgccgaataaaacaaagttgcaaaaagcagtgacggatattgtcaatcggaatcattctgccgccaattttagtacgcggcaaacagttaataagcaaccgtatttgttttacgcacaccaagcagatcggcccaactttgtcttagtagtgcctcagcaacagttctggcatacgtggccgaagattgctttatcggtcacgattgtctatttaatcggtagctggatttttctataccgtttctggcggcaacgccatcatttctttgaccacttgaaaattttagtcgctaatattcatcatattcggcatgaagaagtgcccgaaccgattatttttcaaaaagatgcgtcattatatatcctcgcgcaagaaattaataaattaaatggtgatatgcggcatatgcggcagaagattgccatgcaacagggcagttttgaccgcctaattgaccatttaccggtcggcgtcatggtgattaacgaaaatcgtgaagtcgttttgcacaatgaagcaatggatcggttattggagacgacgattgttactgagaaacacccctatattgatgatatcaagacgtatgaattaacacggatgattgagcacacttttaggtaccgaaagagtcatcaccaagaaattcagttgattcaaaatcaagaacggtttgtggatgcgaatgttgtccaactcaatacggttaaatcgaaattccaagcattagtcattttatatgatttaaccgatgtccggtgcgttgagcagatgcagttggattttgtcagcaatgtgagtcatgaattgaagacgccggtgacggctattacaggctttgctgagacgttgttagctggtgcggcggaagatcctgccacgcaaaagcaattcttacaaatcatctatgacgaaagtacgcgattaactgcgctgattcaagatattttggcgctttcgcatctagatcgtaaggaccaatcgcaagagcaacttgtgaatgtacgtgaattggtgcaggctaatctcgaactgatgcaacaaaaggcacaacaaaagcagttacacgtctccgttgatattccaacggatttagcgattagaattcagaaaatgaagtttaatcaaatcttgaaaaacctaatcgctaacgccatcacgtataataaacaaaacggctcgttggtgattgccgtgcaacttgaaaaagatcaaattggtatccgcgttgtcgataccggtttgggcattccaagtgacctacaagaaagaatttttgaacgattctatcgggttgatcaagcgcgcgcgacccataagagcgggaccggccttggactagcaattgctagcgagattaccgccagtttagaggggcagttgaccgtaaagagtcaattaggtgtcggtagtgaattcattttgaagctaccaaacgcttgatttacacaaaatttacatttgataggcttagtttttacaaaccttttttataatggaacttacgaggtttaaatggaattcgtggaggattaacatgcgcaaacgtaatgttattggcttattagtcacattcagtttattactattggctggttgccagtctaaacaaaatggtcagtccgtaacggcggtcggctcatcagcccttcagccgctgattgaagcgttagctgaacaatacagtgctgatcacagcggtcagttcattaacgtccaggggggcggttctgggactggcttgagtcagattcaatctggcgctgtacagatggggaattctgatttatttgctgaagaaaaggctggcattaaagcggacaagctggtcgatcatcgcgtggctgttgtcggcattaccccagtcattaataagcaattagggattaaaaacttaacattgacgcaactcgcgaagatttttagtggcgaaattgataactggcaagacgttggtggaccagatcagccggttgttttagtaaaccgagcccaaggtagtgggacgcggacgacgtttgaacaatgggtgatgaagtcgcgcaagactaaacccgctcaagaacaagattcaacggggatggtgcgatcaattgtagcgaacacgccaggggccatcagttatcttgctttttcatacgtagatgattcgattgcaatggttaaattaaacggcattgcaccaaccgatgaaaacgtgatgactaatgcatggccaatctggtcatatgaacatgtttacaccaaggggcaaccaactgggttaacaaaacgtttcttggcgtatgtcttatcagatgaggttcaacataaacaagtcggcaagatgggctatattccagttgctaagatgacggttgaacggtcggttgatggcacaattacaaaggttaagtagggggccaattatggatccaattaaagcaagtttacttaagaaatcacgcgcagccaaaagtgaaacacggggcaaattaatcagtttattctgtattagtttaatcgtgttcatcgtgctcgccattttctacttcgtcgcttcaaaagggttagcgaccttctttaaagataaaatcaatctaggccgctttttaacgcagtctaattggaatccaagtttgaaagatagtcatggtcgaccagaagtgggcgccttaccaatgattatggggtcatttggagtgactttcttagcggctttattagcaacaccgtttgcaattggcgctgggatttttatgactgaaatctcacctaagcggggtgaaaaagtattgcaaccagtgatggaattgctcgttgggattccatcagttgtttacgggtttatcggattatccgtgattgtaccagctgtccgtcatttgtttggtggcagtggctttgggattcttgccgggacttgtgttttgttcgtcatgattctaccaactgtgacatcgatgacagtcgatgcactcaagagtgtgccacggcattatcgcgaagcctcactcgctttaggtgcaacgcgttggcaaacaacatggaaagtcgttttaaaagcagccacaccagggattttaaccggggttgttttcgggatggcccgggcgtttggtgaagcattggccgtccaaatggtcatcgggaacgctgcgttattaccacataacttaattaccccagcctcaacgttaacgagtgtgttaacgatgggcattgggaatacggtcatgggttcattagccaataatgcactttggtcattggcgttactcttattattgatgtcactactatttaacttattagttcgtttaattggtcggaagggagcaatgggtcgctaatggatgcaaaaaaatgggataaagttgccaccggtgtgctaaccctcatcgctggtttgatcgtattattattagcaagtttgctcggctatatcttggtgcgcggattaccacacgtgacgtggcagtttttaacgaaacctgcgcaaacctttactaaaggtggcgggattggcgtccaactgtttaattcattctatctattaattttggcgatggtgatttcagtaccgttatcaattggtgccggcatctatctcgcagaatatgcgccgaagaactgggtgacgaatgttgttcggaccgcgattgaagtgttaagttccttaccatccgtcgtggtcgggttattcggtttcttggtctttgttatccagtttaagctaggcttttcaatcttagcgggtgctttagccttgaccgttttcaatttaccgttgttaacgcggaatgtggaagatgctttaaaatcaattcacttcacacaacgtgaagcaggtcttgcacttggtttatcgcgttatgaaacggttaagcatgtcgtgattccagaagcgttacccaacattattaccgggatgattttaggcgctggccgggtctttggtgaagcggctgccttgatttatacagctggacaaagtgccccatcacttgattttaccaactggaacccaatgtacatcgcgagtccgttgaatccattgcgacctgcggaaacattagcggtgcacatttggaagattaactcggaagggattatgccggatgcgactgcggtttctgctggcgcatctgccgtcttaatcatcgccgttttactatttaactggttagcacgggtcatcggcaagcgtgtctaccgtaaaatgacagcagcataggagaaaataatggcagattacgatttaacaaaaacgcacatcaaacatttagatgaaccaaaacatgaaattgccttatcaactgaagatttaaacgtctattacggcgacaaacgcgcgatgcacgatgcatcattgcaatttgaacgctatcgaattaccgcgttaatcggcgcttctggttcaggaaagtcaacctatcttcggagtttaaaccggatgaatgacaatattgctaatacacgtgtgaccggtaagattatgtaccggggcttgaacatcaatagcgatgacgttgatgtgtataagatgcgggaacatatcggcatggtgttccaacggcctaatccatttgccaaatcaatctatgacaacatcacttttgccttgaaacaacatggacaaaaagacaaaaagtatctggatgaagtggttgaaacgtcactaaaacaagctgctttgtgggatcaagtcaaagattcattaggaaagagcgcattggcactatctggtgggcaacaacaacggttatgtattgcccgggcaattgcgatgaaacccgatattttattattggacgaaccggcttcagctcttgatccaatttcaacgaacacggttgaagaaacattgattcgcttaaaagaagaatttacaatcatcattgtgacgcataacatgcaacaagcagcacgaatcagtgattacacggcctttttccattcagggcacgcacttgaattcgacgaaacacgtaaaatgtttacccggccgaagattaaagcggccgaagattatgtttctggtcactttggctaggacgcaaggaggtttgccccgtggcaaataagattattgaatcctcagatgtgcatctattctatggtaagaatgaggccttaaaagggattaatatggattttgttgaaaatgaaattacggcgctcatcgggccatctggttgtgggaaatcaacctacttgcgctgcttgaatcgaatgaatgatttaatcgactcggcgaaggtgaccggtaaattcttattgaatggccaagatatttatgcgcctgagatggataccgttaagttacggaaagaagttggcatggtgttccaacaaccgaacccattcccattttcaatctatgacaatgttgtttacggcttacgtttatccggtgttaaagatcatcgcgtcttagatgaagccgttgaaagtagtttgaaacaagcggccgtttgggacgacgtcaaagataagttacacgaaagtgctttatcactttctggtggtcaacaacagcgggtttgtatcgctcgggtgttagctgtgaaaccgaaagtgatcttaatggatgaaccgacttctgcgctagaccctatttcgagtgctaaaattgaaaatatgttgctagaattgcgccaacagtataccattataatggtgacgcataatatgcatcaggcttctcgtatttcggataagacagcattctttttacaaggtgaattgattgaatacgcaccaacgaagaagattttcttaaacccaaccgaaaaagaaacggaagattacatcagtggccgttttggctaagaaagaagggaaaccacaatgagacgactttttgaagatgagttaaatgatttacacgttcgcttctccgaaatggggatgatggtcaacgaagccatctataaatctgttaaagccttcattaatcacgataagcaactcgcacgcgaggtgattgctgacgatcatcagattaatgaacgggaaacggatttggaacgtaagagttttgagttaatcgcacttcaacaaccggtctcaactgaccttcgcgtgattgtcacaatcatgaaggctagttcagatttagaacggatgggtgaccacgccgtttcaatcgcgaaatcaacgattcgggtcaagggtaatacccgtgtccctgatatcgaaaaagatattgcggatatggcagacaaagttaaacaaatggttgaagaggtattggacgcttacgtcaaagaagatcgtaagaaggccatcaaaattgccgatgaagatgttgcaatcaatgcttattcagacaatatttatgacgactgtatcaaagaaatgcaacgtgattcagaaaccgtcgttgggagcatggactacatgttagttgcaagctacctcgaacggattggcgattacgtgacaaacatctgtgaatggattgtctacctcagaaccggtaaggtagtggaattaaactccaatgcacaagaagatgaattctaaacaattcaattaaaaattttaaaaagcgatgacaaggtcgacttgctcgtcgcttttttagtgggagaatcataatgcaaaaacaaatatacttagctggcggttggtttacacctaaacaggcctcattagtggaacgcgcacacgcggctttaaaacaaaacccaacgattggttatattcatagtccacaggagcatcaatacaagggtgtgacagaagatcatgatccagaaggcatgttcgggggttacgaatgggccaaccaaacgtatcaaaacgacatcacagcaatggatttagcagacatggcagttgtgttatgggatatgcaagacgaagatacgggaacggcgtttgaagtcggctacttgaatgcctgtcataaaccaatcgtctttgtttgtgaagatgatttacaagccaatcccatcaacctaatgttggctaaagggattacccaatgtctaaccagtgtggatgaattagcaacctttgatttccaatttgtcgccggcgaaccttacacaggacaaatcgtttaagcaaaaaagcgcaggacaaaaataattttgtcctgcgctttttttgttctcactcttgatacctaaataaaaatcaacctttggacctatgacaatcgactgtaaaatcggcataatagagtcatagtcaagtgaaacagtacaacgaatgatcaatggaggtcaaaacaatgaatgaacgtcaacgaattttagacttagtgaaccaaggtattttaacttcagaagaagcattagtcttattagaaaatttagccaaaaatgaccaagatgtaaaatcaaatccaactgaaacagcaacggagcaaactgaacaaccaaccgctgataaaagcgcaattgaagaaaaggcacacgaattaaccgttaacctttccggcgttaaccggcagttgcaagatttgaagcaagcaatgcacgctgatcaagaacaagtcactgtccttgatacgatggaagatttagatagtttaagcagtgaaaaagcaaccgaacggcaaacactcaaggctggcttattacaaaagcaagctgaagtcgacgagttggaagccaaacgcgaagcactgacggatgaactcaaccaaatcgaaaaagaacgccgccaaatgaccaaaaatcaatggtcagaaaaattaggcttatcagatgactggaaagaaaatgccagtgaaacatttgatgaattgagcgataagttaggcgaagctagcacacactttggtaagttcgtgaagaatactgccaaaacagtcatggataatgtggattggaaagaagtaaactttaaggtgcctggtttggcaactgaaaagttcagccatgaattcgtttattctgacgtaacaccagaaatgattaacgtcaaagtggctaacggtagtgtacatttccaaatctgggatcgtccagaagtcaaagtcgcagcgcaagtgaagttatatggtaaaatggcagaagcaacaccattggctgcttttgaagcgcgcagtacaattgatgtgactgatgccgacttggtcttccaagtgccgaataaacggattcaagcggacttaacgttctacttaccagccaataactacttacaaacgaatgtgaagttattgaacggggatgttgaattagatggctttaccggccgggatatttacttgaagacgactaacggtgaattaacgttaatcagcaccaacgctgcaatggtggaagctgaaaacgtcaacggtggcattacctttgatcaaggccgttacgatgatttactcgcaacaaccgtcaacggtaacctattgattcaagcgcaagttttaaatgcgagtgtttcaacggtcaacggggatatcaagaacactttgacgacaactgatttacaacatctaaaagcaaaatctgtgaatggcacaatcaagacagctttaccacaaactttggcaatgactgttgatgcccgcacgcgttttgggatgattaaaaatcggcttgcaaacacccaaaccatcgaacaacggcaaagtacggggaatcaaatgttacaacttggccgtaacgacaatgaacaggcagctcgtttaacattaagcacgacaactggtaatattttattgaaagacaacgataactaaaaaattaaggaatggtgggttttaacaatggggaaaagactttataaatcaagagataacaaaatgatttctggtgtaatgggcgggattgctgagtattttaatattgatgcgacattagttcgaattctatatgttgtattctcaatgttttcagcagcgttccctgggattgtggtctacatcatcttagtgatggtgattccagaacggccacgtcagagtaaacatgattctgaaagtgaatggagtgagttttaatgccttttttaatgattttattagtcattatcgccattatggcggcagttggcgtgtttagtctcgtgattggctcgctactgttattattaaaatttgcgctaccactgattgtgattgggttaattgtcagcttcatctatcgggcaattgttggtccaagtagacgtcctcggcatgcagactggcgccatgactaccaagactattcttatcaagaaacagcacatcaaggtagccgtcaacgcaaggaagcccgggatgtcaaagtagacgatgacgactggagtgatttctaatgcgttattggacacgcgtaattgttgatacgctgttattcatcgcgatttctggtctattaccaaacttgttttatgttgaaaacatttggatcgcgttagtcgccagcattgtgttatcgattttaaacatctttattaaaccattgttgagcttactctcatttccaattacgtttttaacattcggtttgtttagtgtcgtgattaacgggattatgttagaattgaccgctgttttcgtcggcgcccactttagctttacaagttttggagcagccgtgatcgtggcaatcattttatcaattgccaatacgattattacaaatcaatttgtgagagagcgttattaaaaagttagcgggactgacgtcaattaagattgacattgggcccgtttttttgtttagataagaaaacgcctacattaaagttgaaaaatcaccttaaaagcaatatgatagaggatataagtgaaaatgaaggacgggtaactcatggctgatagtgtttcaattcaaaaactagtcaccgatttaaaattacaagtttatgccggtgaagcatatttaaaaaataaagcagtgacggtgagtgatatttcccgtccaggactcgaattaacgggctactttaattactacccttacgagcgggtgcaattatttggacggacggaagtttcatttacgcaaaatatgacaccagaagaacggttaatgattatgcgtcggatggcttctgaagatacgccctgtttcttggtctcgcgccaattagaaccgccaatggaaatgcttaaagcagctgaagaagcggggattcccgtgttggggtcgaatttatcgacaacgcgtttgtcgagtttagtaaccgattatttggaagggaagctagctgaacggcgctcaatgcatggtgtgttagtcgatatttacggtttaggtgttttaattaccggcgattcaggtgttgggaagagcgaaacggcattggaattagtcaaacgggggcatcggttgattgctgatgatcgggtcgacgtttatcaacaagatgaacaaactgtggtcggtgaagcacctgcaattttgcgtcacttacttgaaattcgaggcatcgggattatcgatgtgatgaacctctttggtgctggtgcggtgcgggctgaaacgtcaatttcgttaattgtccacttgcaaaattggtcacaggataagaaatacgatcgcttaggttcagataccgaagaacaaatgattttcgacgtccctgtaccgaagattaccgtgcccgttaaagtcgggcggaacttggccatcattattgaagtggcggcaatgaacttccgggctaaatcaatgggctatgatgcaacgaagaccttcgaagccaatctaggcaagttaattgaagccaattcagatgaagaagaatagttaaaagtcagaaaagttcgttaaatatggtaggtctaatgactagtttgagctatactgttagaaagacagtatgcaaactagtcttttttagagtgcgcagtaagccgggtatatcctgaggtttaacacagaatggcgaaggattgcgtcagtaatcgtttgacattcaggggtaaccggaaggatatggcttacggagcacgtttcggataagagtgcattcaagcttgtccaacttttgcgtattagcacagtgaagcgataagcgacgcagtcgattgtttgcttcacgacgctaagcgcagaaagttagcttgaaaagtacgttttgatgaaagcacatttacaaaaggagcgaataatttgaatctactattaggcgcattaaatccgattgcattacgattgggcgcattggagatccactggtatggtgtgattatcgcaactggggtcgttttagccgttggattggcattacaggaagctaaacggcgcaatgtcagtgaagatgatattttaaatttaattttatgggcattaccatttgccttaattggggcccgactgtattacgtcgtttttgaatggtcgtattaccaagccaatcccggcgaaattattcagatttggcacggcgggatcgcgatttacggtggactgattgcagctgccattgtgttcattatctattgtcggcgtcatgcactatcgccttggttagtgttggatattgcggcaccaaccgtgatgatcgcacaagcaatcggacgttggggcaactttatgaaccaagaagcctatggggcgccaacaacattgcactttctccaatcgttacacttacctgattgggtgatccaacagatgttaattgatggtgcgtatcgtcagccgacattcttatatgaatcagcatggaatgtattagggtttattagcatcatgagcattcgccatcgaactggttggtttaaacaaggcgaaatcttatttagctatttaatttggtattcgtttggccggttcttcattgaaggcatgcggactgatagtttattcatcggtccattgcgggtatcgcagattgtctcactcgtcttattctttggtgcaattggtctttggatttggcggcgtaagcacagtcagttaccggattatttaaccggcaatcaagcaaaagaacagaaatagggatttgtttaaaaggagaattatcagatgacagtaaaaattgcagttttaggggccggttcatgggggaccatcttagcaaacttattagtggaaaatggccaccaagttgagttgtggggcaatgatcctaaaaaagtcgctgaaataaatgaacagcataccaatacacattatttaccagattttaaaattgatccccagttacacgcaacgattgatcttaacgttgcacttgaccaagttgatgttgtcttgtttgtaattccaacacaagcgattcgtgcggtggcggaacagattgttcctgtgatgattgcgaaaaaagtgaaacccgtgattgtgacggcttcaaaagggcttgaacaaggcacgcacaaacggatttcagaagtcttgacagaagccattccagaaaccaaccgcaatgggattgttgttttatcgggtcctagtcatgctgaagatgtcgcacaaaaagatattactaccttaactgccgcatcaagtgacttgattcaagcccaatggatccaagagattttcatgaatgattatttccgcttatataccaaccctgatgtggttggtgttgagatgggagctgctttgaaaaacgtcattgcacttggcgcgggtgctttaaacgggcttggttatggagataatacgaaggccgccttgatgacgcgtggcttagctgaaatttcccgcttaggcgttgccatgggggctaacccattaacctttatcggattatccggtgttggggatttaatcgtgactgggaccagtgttcactcaagaaactggcgtgcgggaaatgcacttggtaaaggtcaaaaattagctgatgtgctagccaatatggggatggtcgtcgaaggggtcgcaacatgtaaagcagcctatgaattggctcaacaacgttctgttgatatgccaatcacacgggccatctataatgtattgtatgaagattgtgatattaagactgaaattgcgtatttaatgcggcgttcaggtaaacctgaaatcgattttgatgaagtctaaaactttttaacgaataaagcggcatcattttgaatgggtatcgcacccatcatcagagtgtgttatgatgattagcgttgagaaaaaggctaaaggagaaccgattactttatgggcgatttggtatctgtaagaccaacttgtgagttttattttgacagagggatgcaggcgtttgaacgatttcagtacacgcgcgcattaacgtgtttacaacgggcaaagtcgctggctaagaccaaagatgattacatctttgtggtgtgccaattagcgatttgtttggaatcggttggcgactatcatggtgcggcgaccgttctggaagaaattccaaccgccaactatcagagtcatcctgagttacaatattttttagcaacggcgtatgcctttttaaatcagacgcaggctagctatgaattagcgactgcttatttacagagtgacgattcggatttcgatgccgaagccactgaattattacaagaattgaaaccaacaagtccatcaaactggtaaaacagtttggtagacttttttttacataacgggtaagatacattctatgaagaacgagcactttttaaaagtaaggggataatagacatggctaaaagttatgatgtaattgtgattggcgctggacctggtgggatgacggctgctttatacgcctcacgtgcgaatttatctgtattgatgttggaccgcggaatttacgggggccaaatgaataatacagcagaggtcgaaaattatcccggctttaaatcaatccttggtcctgaactaggcgaaaagatgtatgctagcgccactcaatttggtgctgaatacggctatggtacggtcaactcgattgaactgcaaggcgagatgaagattgtgcacactgacgaaggcgatttcgaagcgcgttcaatcatcattgcaacgggttcagaacacaagaagattgggatccccggtgaagatgaattcggcggtcgtggtgtctcatactgtgcggtctgtgatggtgccttctttaagaataaagaagtcgtggtcattggtgggggcgattcagcgattgaagaaggcctctacttgacgcaattagccagcaaggtgacagtcattcatcgtcgtgatgaactacgcgctcaaaagattttacaagatcgtgcatttgctaatgacaagatggacttcatctggaatgcacaagtgacaactattgaaggtgacgacaagaaggtaaccggtgtcacttatattgataaggcaactggtgaaaccaaagaagttgctgcaagtggggtcttcatctatgtagggattgaaccaatgactagtgcctttggtgatctagggattctaacggatgccggttggattaaaacggatgaccacatggcaaccagtgttccaggtatctacgcaattggtgacgttcgtgaaaaagatcttcgtcaaattacaacagcagttggcgacggcggcatagcaggccaagaagtatttaaatacttacaaagtatctagagtgcgacggcagccggttagcttccgaggattaacacagaatggcgaaggattgcggtagcaatcgtttgacattcagggttaaccagaaaagacagttcgaggaagcacgattagagtgcgttcgaaacgattttatttttgaggattaacctaaaaatgtggcttatgacgcacatttctagcggtcgactaaattttagtcggccgttttttattttggaaaaaattttaatttttagaaggacaagcattattaaataatcgacccagacaattagcttggtgcgcattaccgtacaaccgatgctttaggaaagcggttgattatggtatacttagaactagcttttagactaaaatgcgggggttacacaatgagctggcaagataattatgcaatttggaataatcaaacagaaatggatttacctttaaaaaaagcacttaacgaaatggcaaacgaccatgatgcattagaaaaagcatttagcgttccaatggaatttgggacagctgggatgcgcggtattttaggccctgggatcaactgcatgaacatttatacggtgcgtcaagccacagaaggcctcgctcaattcatgaaaacattaccagaagcgactaaaaaacgcggtgtggctatcagttttgattcacgttatcaatctgaaacatttgcgcacgaagcagcgcgggtcttaggtcaacatcaaatcccaacgtttgtttttgatgccttacgcccaacacctgaattatcatttaccgtacggcacttacatacctatgccggtatcatgattacagcaagtcataatcctaaacaatacaatggttacaagatttatggcaaagacggcgcgcaaatgccacctaaggaatccgatttaatcacaagttatattcgcaaagtaaccgatttatttgcgattgaagtggctgatgaaagcacattgcgcgaagccggcttaatgactttgattggcgaaaatgtggatcaagcttacttagctgaagttaagcaagtcacgattaatcaagaattggtcgacacagtcggcaagaccatgtcattgatttacaccccacttcatgggaccgggaaagtacttggtgaacgcgcattgcgtcaagcaggctttgaacaatttacaatggtcgctgaacaagcagttgctgatccagaatttgcaacgacaccattccctaatccagaattcccacaaacattcgatatggcgattgagctcgggaaagcacaacaagctgacttgttgattgcgactgatccagatgctgaccgtttgggcgccgctgtgcgtcaaccagacgggagttaccaattgatgactgggaaccaaatcgcttctgttttattacgttatattttacaagctagtaaagatgctggcacattaccagccaatgcagcggctgttaagtcaatcgtgtcaacagaattggcaacgaagattgcagcgagctacaatgtgaagatgattgatgtcttaaccggcttcaaatttatcgctgaacaaattcaacactttgaagacacagacgaaaacaccttcatgtttggtttcgaagaaagctatggctacttagtgaaaccattcgttcgcgataaagatgcgattcaaacattggtcttattagcggaagttgcagcttattacaagtcaaacggtaagactttgtatgatggcattcaagaattatatgcggaatacggctacttcgctgaacaaacgactgcagttgatttcgaaggggtcaatggcccacaacaaatggctgacttgatggttaaatgtcgtgaagaaagcccagttgaatttgccggcatcaaagtcgcttcagcagaagacttccaaacacaaacagaaacttttgcggacggtcatactgaacccatcaatttaccaacatctaatgttctgaaatatcacttagaagatggcacttggattgcgattcgcccaagtgggactgaaccaaaagtgaaattctatgtggggacatccgctgatgatgccgcaacagctgatttgaagttagcaaacttcgaaaaagcaattcatgaacttgtaaaatagatagggcttctgttttacatttcaggataacttacctataataaagaacagtaaatagacggactactgcgttagtcggtctatttttgtaagaaaagggaggtagtttggtatgggtatgcatcaatatttgcaaggtttgaataatttggagacactaaatcgcgcaccaggattgtttaaatatcaagaacattccgttgcagcgcactcctttaaagtagcagaaattgcacaattattaggcgatattgaagaagaaaatgggcaaacgattaattggcaagtgctgtacgaacgcgcactgaaccacgattatacggaacggtttatcggcgatattaagacgccggtcaaatacgcaacgcatgaattgcggacgatgttggccaatgtcgaaagttcattaaccgctaacttcattaaaaatgaaattccagatttcttacaagaacggtatcaacgtcgtttgagtgaaggaaaagatgaaactttggaagggcaattattagccgttgccgataagattgatttactctacgagtcttttggtgaaattgaaaaaggtaatcctgagaatgcttttctagaaatttttgcggaaagtttaaaaacgattatgcaataccaaaatctcgcatgcgcccgttatttcatccaagaaatcttgccagatttactgagtgaagacttcgcagatcgagggaagctaacccaattagtgagacagacgctagcggaatagagtgctgttgtcagtcgctcagattcagagcatttgcctaacttggcgaattgacgctataagcggcgatttgacaagtgtagcaaagcgcaggaatctactgacaacagcacgtttccacactttagttgaaacgtgctttcattaagcatccttttccggttagctacaccagccgcatcatcgactgcgtcgctaatccgtctggttaggctaatcctcaaaggataaccgcttaatgacgcactctttaatcagcactctggcgaaagtatgttcggtgtggtagaatagtgaatgacttaaaggacaaggaatattattctttataaaatcggtaagtagacgttatggtggagggcaacttctacccggcgtcttcttttatcgctagcaaatggtaatggaggcttttgatgattgaacgacagaatgataaccaatttgatttagtggcgccctatgaaccagctggggaccaaccagcggcaattgaaacgttaactaagaacttcgaggcgggtgcaaaagcacaagtcttgatgggggcgactgggaccgggaagacctttacgatgtcgaacgtcatcaagaatttaaacaaaccaacattgatcatttcgcataataagactttggcaggccagctctatgccgagtttaagcaatttttcccgaataacgcggtagaatattttgtcagttactacgattattaccaaccagaagcttatgtgccttcaagtgatacctacatcgaaaaagattcgagtattaacgacgaaatcgacaaactacggcattcagcaaccagtgcgctgttggaacgcaacgatgtgattgtggttgcgtcggtttcatgtattttcggcttaggtgatccgaatgaatatcaagatcacgtcctttcgttacggccagggatggagattgagcgcaatgacttattgcgtcaattggtggatattcaatttgaacggaacgacattgatttccaacggggccgtttccgcgtccgtggtgacgtggtcgagattttcccggcttcacgtgatgatcatgcgttgcgggttgaattcttcggcgatgagattgatcgaatcgttgaagttgacgcgctaaccggtgaagtcattggtgaacgcgaacatgttgcgattttcccagcaacgcatttcatgactagtgaagaaaagatggaaaaagccattaagagtatcaaggctgaattagaaggccgactaacggaattgaaggcggacggcaagttgttggaagcccaacgtttggaacaacgaacgaattacgatcttgagatgatgcaagaaatgggctattgctcggggatcgaaaactattcacggcacatggaggatcgtgcggcgggggaaccaccttatacgttgctcgatttcttcccgaaagattcaatcatgatgattgatgaatcccatgtaacgatgccgcaaattcgcgggatgtataacggggatcgtgcccggaagcaaatgttaatcgattatgggttccgattaccaagtgcgcttgataatcggcctttgacgctacctgaattcgaagaacacgtcaatgaaatcatgtacgtttctgcgactccaggcccttatgaagctgaacaaaccgatattcaggtcgatcagattattcgaccaactggcttgttagatccgaatattgaggtccggccgattatgggccagattgatgatttggtcggcgaaattaatgatcggattgaaaagaacgaacgcgtctttattacaacgttaaccaagaagatggcggaagatttaactgactatctcaaagaactggggattaaagtccgttacttgcatagtgatatcaagactttggaacgaacggaaattatccgtgatttacggcttggtaagtttgacgtcttaattgggattaacttgttgcgggaagggattgacgtccctgaagtctcgttagtggcgattttggatgccgataaagaaggtttcttgcggagcgagcgctcattgattcaaacaatcggccgtgcttctcggaatcaaaacgggcaagtccttttgtatgccgataagattaccgattcgatgcgcaatgcaatggatgaaaccaagcggcggcgttcgattcaagaagcctacaacgaagcacatcacatgacgccgaagacgattatcaaaccagttcgggatgcgatttcggttgttcaatcagtcgaacaccctgaagaagtcaagatgaccaacgagattgatttcgatagtatgtcgaaagctgaaaaactagaaatggtagaacggttatctgaacaaatgcggaatgcggccaagaaactggacttcgaacaggcagctacgttacgggataccatcttagagattaagagtgaaattgattaaaagaggtaaagcatggcaaatgataagatcgtcattcatggcgcaagagcgcataatttaaaagatattgatgttacaattccacgggataaactggtggttgtgacgggattgtcgggctctgggaagagttcgttagcgtttgatacattatatgccgaaggacaacggcgctacgtcgagagtttatcggcttatgcgcgccaattcttaggccagatggataaaccagatgttgattcaattgatgggctcagtcctgcgatttcgatcgaccaaaaaacaacgtctaaaaatccgcgttcgacagtcgggacagtcacggaaattaatgattatctccggcttttatgggcgcgggtcggtcatccaatctgtccgaacgatgggactgaaattagtagtcaatccgttgaacaaatggttgatcgtgtcttagcgttacctgagaagacgaaactccaggtgatgtcaccgattattcgtggcaaaaaagggcaacataaaaaagtatttgaaaaaatccaacgagaaggctatgtccgtgttcaagtcgatagtgaagtcatggacgttagtgccgatatcgaattggataagaataaaaaacacgacattaatatcgtggtggatcgaatcgtcgtcaaagacggtgtccggtcccgtttatttgactcgttcgaagcggctctgcgcttatcagaagggtatgcgactgccgatatcatcggtggcgaacaactacttttctcagaacactatgcctgcccaatctgtggctttacggtgggcgcgttagaaccccgcttgttctcgttcaacgcaccgtttggggcctgcccagactgtgatggtttaggggttaagctagaagtcgatatggatttagtgattcctgataccagcaagacattgcgcgaaggagccattgcgccttggaatccaattagctctcaatattatccacagatgctcgaacaagcttgcaagtcatttaaaattaacatggatcgaccatttagcaaattaacaccacgccaaaaagacattatcttaaatggttctcagggtaagaacttccacttccattatgaaaatgatttcggtggtgtgcgtgatgtggacgtgccgtttgaaggtgtattagccaatattgaccgccgttatcgtgaaaccaatagtgatttcacacggacgcaaatgcggacgtatatgactgaattaacgtgtcaaacctgtcatggtgctcgtttaaatcgacaagctttggctgttaaagtgggcggccaagatatcgctgccgtttcagacaacgccatcaaagaagctttaccattcttcgatcaacttgaactttctgaaaaagacagtgtggttgccaaaccaatcttgaaagaagtgcatgatcggttaactttcttgattaacgtcggtctggattatttaacgctcagtcggtcagccgggaccctttctggtggggaagcccaacggattcgtttagccacgcaaattggttcgaacttatctggcgtgctctacatcctcgatgaaccgtcaattggtttgcatcaacgtgataatgaccgtttgatcgggtcactgaagaagatgcgcgacttaggcaatacattaattgttgttgaacatgatgaagatacaatgcgcgcggctgattacctgatcgatatcgggcccggcgctggtgaactcggtggtgaagtgatggccgctgggaccccaactgaagtcgaacataatccgaaatcattgacgggccgttatttagccggttccgaatatattccagtaccgctagaacggcgtcaaggcaatggcaagaagattcgcgtgaccggtgcggctgaaaataacttgaagaatctgacggttgatttcccattaggtgaatttgtcgcggttactggtgtttcaggttcaggcaagtcaaccttagtcaatacgattttgaaaaaagctttggcacaaaagatgaaccgtaactcagcaaaaccaggtcaatataaaacaattacaggttatcagaatcttgaaaaactgattaatattgatcaaagtccaattggtcggacaccgcggagtaatccagcaacgtacaccggcgtctttgacaatattcgtgatttgtttgcgcaaaccaatgaagccaaactacgcggttataaaaaaggccgttttagttttaacgttaaaggtggccgctgtgaagcctgcaagggtgacggcattatcaagattgaaatgaatttcttaccagacgtgtatgtgccgtgtgaagtctgtcatggcagtcgctataattcagaaaccttggaagtcgtctataagggcaagaacattgccgaaatcttagacatgacggtcggtgaagccgcagtcttcttcgcaaacattcccaagattgcccgcaagttacaaacgattgtggatgtcggcttaggctacgtcacattgggccagtctgccacaaccttatcgggtggagaagcccaacggatgaagttggcctctgaattacagaaacaatcaacgggtaagaatttatacatcctcgatgaaccaacgactggcttgcataccgacgatatcaagcgcttgttgggcgttttggaacggttagttgaagaaggtaacacgatcttagtgattgaacataacttagatgttattaagactgccgatcacatcattgacttaggaccagaaggcggcgataaaggcgggacaattgtcgcgaccggtacgccagaagaaattgccaacgtcagtgaaagctatacaggccaatatttaaaacctgttttagaacgcgatacagcacacacaattgccgctcaggattaaccagaagatggttgatagaatgtgtttaaaaagcgggcggttaagacagaatgattgctgtcttaaccgcccactttttgttttgtcaaatttagttgtagattgtccgtaaaaaaagtatcataaaggtattaacaacgagaggtgattgggaatgtttagaaaaaatgaatggcactttgattggtcagaatttatgacggggattattttcttaatcgttgcatattgcttgtttaatcaaccaggtaagacattatctggtttggtaatcgtgattgcgattgcggcgattattcggggaattgccaaaatcagtgcatataatcggttacgtcaagagacagggatgcgcgcaacgttaatgttggtcgatgccattgtcgatgtcattttgggaattttgtttatcttgaatattccagctggagtggctgctttaggttatatctttgcattctggttcttgttcgattcaattgtggcattattgaatgtcggccatctcaagcaatttagcacaggcctatacatcgtttcgatgattctgaatatcttaggcgtaatcgttgggatcttattgttaatggatccagtggtgactgccgtaacgatggtgaccctagttggtttttactttgctttctttgggattaatgccatcatcatcgcatttgcaagacgtttatagtctctaaatttaatgattgcggaacaatttgattgttctgcaattttttttatggaaaaaataagctctttcaaatgcctagacattaggaatgaactcggtttaatagcattaaataacacgtgtcgagagtttcgacagctttcaatgacacaccaggaatgttacaatgataaaagcgaaaacttaaggggtggtctgatgacagatacattgaacttagtagtgattacagggatgagtggtgccgggaaaaccgttgccatgcaaagttttgaagatctaggttatttttgtgtcgacaatatgccaccgacattgctacctaagttttgggaattggttaaggagtccggcaaagtgactaagattgcattagtgattgatttgcgctcacgtgctttttacgatgagatcattgaaatgcttgctaaccttgataatacccaattcgtgacgactaagattctcttcttggatgcatcagatgaggaattggtttcgcgatacaaggaaacacgccgttcccacccactagcgatggaggggcgtttaatggacggtattcaaaaagaacggcgcctgttaactgaaattcgcaatcgagcacagatggtggtggatacttcaaccatgtcaccacgacaattaagagaaaagatttttcatgtcttcaagacgtcagataatccgtcattccatattgaagtgatgtcatttgggtttaaatacggtttaccaattgatgcggatatcgtcatggatgtccgtttcttaccgaacccatactatgtgccagcatttaaggaattaaacggtttagaccaaccggttagagactatgtaatggcgcagccagcgactgaaaagttctacgaacaatttagtgggctgttaaaagacatcatgccaggttatctcaaggaaggcaaaacaagtgtgacaattgcgattggctgtaccggcgggcaacaccgttcagtagcgcttgcccaacgattggctgatgatttatcgttcgattatccggttgacgtgacccaccgggatatgaagaaacgcaaggaaacggttaaccggtcatgacagctactaatcggattatccgggtcattaaagggcgacgaccaaaagtcgttgtgattggtggcggcactggactacccgttatcttaaagagtctccgtgaacagaatgcggatgctacggcaattgtcacggttgccgacgatggcggttcatccggcgttattcgcgattacattaacgtggtaccacctggtgatattcggaatgtattagtcgccttgtcagatttaccacagttaacgctcgatattttccagtaccgctttaaatcacacgatgcctttttctcagggcatgcgattggtaatttaattattgcggcgttatctgaaatggaatcaggtatttttgatgctgttcaacggttatcagaaatgatggcggttgacggtcatatttatcctgcggccaatgttgcgctgtcgttgaatgctgaatttaaagacggcacccagttaacaggggaatctgagattactgcagcacgcaagcagattaagcgtgtttgggtctcaaaaacggatcaagatgatactgtagcacccgaagccgttcaacaagtggttgatgcgattttggctgccgatgtggttgtcttaggacccggcagtttgtttaccagtattttaccgaatctaatgattaaaaacttaggtgcggcagtcaagcaaactaaggcggaagtgatttacatttgtaatatcatgacgcaaaaaggggaaacggaacactttaccgatgccgatcacgtccgcgtgttgaatgatcatcttggtcagaacttcgtggacacggttttggttaataccgcacaagtccctgaaaactatttggatcatcaaaagtacgacgaaattctctggccggttgaacatgactttgatggcttacgaggattgggttgtcgagtgatttccgataactttttgaagttgaaagatcatggtgtgttccataatggacaaaaagtagcgagtgaaattatgaatcttgctttccaggtcaatacagctaagcgaggtgaataatcgtggcctcatatgcaagtgaagtgaagaaagaactgacgcaacttgaagtgcatcctgaacatgcacgagcggaattagccgctttaattcggatgaatgggtcactgagcttgatgaatcaccaatttgttttaaacgttcaaactgagaatccggcgattgctcgccggatttatagtttattgaaacaaaattatcaagttgaatccgaattactagtacgtcgcaaaatgaagttaaaaaagaataatcaatacatcgtgcgcttaaagtatgataccaataccgttttaaaagaccttgatattgttgaggaggacggttttaccattcatacaaaggtgtcagaagatgtcattaatgaagatcagcgcgtccgttcttatttgcggggcgcttttctagctggtggctcagtgaataatcctgaaacaagccggtaccatttggaaatctattcattgtacgaagagcataatcaagatattgcgcgcatgatgaatcgttttggcttaaatgccaaaacgactttccgacggagtgggtacatcacttatctgaaagaggctgaaaaaattgctgattttctacaagtgattggtgctaccaacgcgatgttgaagtttgaagacattcggattgtgcgggatatgcgtaattcggttaatcgcttagtcaattgtgaaaccgcaaatatgaataagacaattgatgctgctacaaaacaaattgaaaatatcgaatacttgcgcgacaccgttggattagataatttaccggcgaagttgcgtgagattgcgctactccgtttggaatttccagatattacgttgaaggaacttggggaaaaaatgccgagtggggcaatttcgaagtcggggattaatcaccggctcagaaaattgaatcaacttgccgaagcccaccaacaggggaatggataagggacaaaataaataggtagtgcacaatatttgacttgtacaatataattaagtacaataactgaaggacattttatggaggaaaattatatggttaaaccagtattattagatgaacaactctgtttttcgatttaccgcgcacaaaaggcttacaatcacttctacggtaaggtattaaaaccttacggattaacatatccacaattcatcgcaatgcttgcattgtgggaacatggcaagatgtcagtgaaagaattagggcaccatttagaacttgatagtgggacactaacaccgcttttgaaacggttagaagctgatggttgggtaagccggaatcgtgcatcagacgatgaacgccgagttgacgttaccttaactgaaaaagcagaaagtcaaaaagaagaaatctacgaacgggttggtgcttgcacaaactatctcgatttctcaagcgataagtatcatgaattacgtcaagaaatgaatgaagttgaacatcatttgaatgcgattcaaatggataatgcacgtttttcataaaatgacggataaagggttccaaaagatttgatggtacattgaattttttggaaccctttatcgtacatacaaaaacaggtgccccgaggggggacacctgttttttattttagtagttgacttaagtcagtcatgtcaattgattcatcaaagatatggtcaccaagaatgatggtcgggacgaatttaatattggcacgattggcttcagcaataattgcggttaaattttctgcattatcttgtggcgttaatttgagattttgatcgatgtattttttaaattcatctggtgtcagatcattacgccatgttttttgatgcgtaaacaagaatgatagtgtttgcagcactatttcgggttgatcaaaaggtaaataggtatgggctaaattccccagttgtagatcctctttatccttatcaaaaggtttgataatacgttttagccgaccagctttgactgcttcagtcatcgtttcttcggattttaaaaaccacttgcggcaatagggacaagcgacgttgataaattcaattgatgttaatggtgcatctggctgaccaattgtaataccgccggtggttgtcacattctcgcttttaatcacactaatatccatggaagaccctcctttaagatactgccagtataacaaatttggtataaaaaaagggctagatcaacttgatctagcccttttttttactaatcctcagaagagaaccggtttattatctactctattttggttggttgaccataatatcgtcaatcaaaccgtaatcttttgcttcttgcgctgtcatgtagttatcacgatcagtgtcagcttgtaatttttcgaaggtttggcctgagttgtctgccaaaatttggtttaaacgtttccgagtcttcaaaatttcgcgcgctgcgatttcaatttcagtttgttggccttgtgcaccacctaaaggttggtgaatcaagacagttgagttaggcaatgcaaaacgtttgccctttgtcccagctgaaagtaaaacactggccatagaagcagccatccccattgcgattgtttggacatcagacttgatgaagttcatcgtatccatgatggctaaccctgcggtcacagaaccaccaggtgagttaatgtagattgagatgtccttatctgaatcttgcgcgtccaagaataataattgcgcaatgattgtgttagccatttggtcgttcacttcaccagataacatgataatccggtcttttagtaaacgagagtaaatatcgtaagcacgttcgccacgagatgtttgttcgataactgtcggtactaacattgaattgcctccttatataagccagagtagaatcactctgtagtctataaattgaattttacagcaaaggtcaattttggtcaaatagaaagcctcttttcagaaagattatggtcattttgtgttcgaactgaaaatatggtatacttaggaaagttaatcagcacttatcactgtagtatcaagtattatttgaagactttaatcaactggagtaaccatggagttacaagtagtgtaaagaggcggcttacgctgtttaaacgagaagatatttagaaacacaagaatttagacataattgaattaacccaaaaataaaagcgacgtgaatcacacgtcatctccactagccattcgatgctagtgtgcgtagccaattagtgactggctacctgacattatgtaagaatttaatatgcgaaattaattagaaggccacctaggaataggtggcctttgtcaatggtttaaagattgagttgttcatgagggggactcaatcttttttaggctatatttgtaagcgctattgtcaaaatgataatcgcgtgctattatatgaaattgaaccggttcaattatattcaataaagggagaaatgactgtgaaattcgtagataaactgtcagaaaagatgttgccgtttatttctaaaccaataatcagcggcatctaattgcaattcgggatagcttcattgtgacaatgccacttgttatggcggcctcgcttatggttttattaaatgcgctaattttctcaaacgccgctgttcaaaagattgttgatttaagcggattagctgacctagcaacaattgtgaataatgggacgatgagtattttatcaattgtggtctgttataacatcggtgctaatttagcaacgcattatgttcgctctggaaaagtgaacgatcctgcatttagtgcagttcatgctggtattttaagtttggtaacaatgtttattttgatgcctgtgacgagtaccgtcactttagcaaatgggaaaacggcggaagcaacaggtgttttcttgcaaagtttaacctcgtcatcaggacttgcaacagcgatgttagcagcattgattagtacggagttattcattcgttttacaaagtttgaaaaaatacgaatcaagatgccagaaggcgtgccaccagcagttgcaacctcgtttaattcattggtcccagaagtctcggttattttgatttttgctatttttgtatttattttaaatgtgacaaccgggttgaacgtccctcaattaattgaccttgcgattcaaacgccactaaaatcgtttgtattatctgtaccaggtacgttattcttacaattcttctcagatttcttatgggtctttgggatgcttggttctagcattttagcaccagttcgccaagcaccattgctacaagccattcaagaaaatatggcggccttttcagcaggacatgcgattccaaatattattacagaaccttttacaaatgcgttcggcttgattggtgggggcggttgtatcttaccgttagtgattgccatcttatgggcttcacggcggaaagatcaacggcaagttgctaaattagggttaacaacttgtttcttcaatattacagaacctgttatgttcgggttaccagttgttatgaacccaatcttcatgattccatgtgccattattccatcaatcaatttagtgattgcttattttgcaacaagcttaggtttgattagtaaaacggtagcggctgcaccatggattacaccgcctgttattcaatctttcttggcaactggcggtgattaccgagcagcgattttaaccatcttattaattggtttagatgtctttttattcttaccatttgtcattgcaagtaacaaaatattaactgaggaatgaggtttttgaaatgcagtatccatatcaagacgcagcgctgaccattcgtgagcgggtcactgatttactttcacgcatgagtacgcaggaaaaaattggtcaagtgaatcaacatctttatggatgggaaactttcgaagattctcagtcattaacgtttacagaaaaattcaaggcgcatgttgaatggggcggcggtgtcggtgcactttatggtttatttcgcgcagatccatggtcaaaagtgaactttgaaaatggcgttcgtgcacaggatagttagcgagttgctaatgaagttcaagaatatgtcatggcgcattcacgctgggggattccagcattaattgttgaagaatgtcctcatggccatcaagggcttgaaggaatctcgtatccaactaatattggccgcggcaatatgtttaatacgcggttaatgcagcaatcatcgcatttgatggcacaagaactagtgcttaaaggcgttaacctagcgcttgtttcgacgcttgatttggtcaaagatccacgttggggccgttcagaagaatgttttggtgaagatcccattttagcggcgcgaatgagtgaagccgttgtggcgggttttcaaggggatttaattcaaagtgatgttgctttcttagaccaacctgctaaaccgcgaacgactgatgccattggtgttgtattgaaacactgtattgcgcaaggtgaagcattgggtggccataattcaggcaccgtcacaattggccaacgtgaattttcagacgtctatgaaccccttttgagtagtgtcaagaatgcggcaggtgtgatggctgcttataacgatgtggatggggtaccgtgtcatatcaatcagccgttgttgactcaagatttacgggatgtaaatgggtttcaagggattgtgatggcagatggtgttgcgcttgatcggttatcaggaatctttgaaacacaaccagaagctgcggcggcagccttaaatgcaggtgtcgatctaagtttatgggatcagacattcctaacgcttgatcaagccattgaaaatggcctagtagacgaagctgccttagataatgctgctggccgagtactagcgttgaaattcctgttgggtctgtttgaacaaccctatgtacaagccccgaatgcgcaattgacggccttacttgaaaaagctgatgcgctgaatctgcaagtggcacgtgaaagcatgacgcttgttaagaacaatgggcttttaccaatccggaataagccgcaaaagattgcagtgattggccccaatgctgatgaattatataatctcttgggggattatacagcagcacaaagttcagcgcgtcaagcgcaaacaatttatcaagcgattcaagaaatgtttcccgagtcggaagtcgtgtatgcattaggctgtgaggtgcgtaattcaattcatcaagaagaggcaattgccaaagtagttgagcttgcgcgcgatgccgatttaatcatccctgtattaggtggttccagtgcacgtaattttgatatggccttcctaagtaacggggcagtgagttcaaaaggcatcaacatggattctggtgaaaatgttgatgtcgcatcacttagtctggggggccaacaagaagtgctgctcaagcaattgaaagcactaggcaagccaattgcatgtgtcatggtgcaaggccggccatacgatttaacactggtaaatgaacttgcagatgctgtattgattgcttggtttcctggtcaacaaggtggccgcgcaattgctgaaactttagtgggacttaataatccaagtggtaagttgagtgtgtcttacccgcgcaatacccagcaactaccggtttactactatcaacgcgatgctgctaaacaagatgattactatgatgaggttggccaaccgttatatccatttggttacggacttagttacgaccaatttgattatcgacaattagcggttaagcaaatggttgacaaactagttgtaactgttaaagtaaaaaataacggacagtttgtaggccaagaaagtagtttattatttgtcaaattaactggtggagcagttattcaacgaacgaagctgttaaaagctttccaaaagaatgccttccaaccaggtgaagaaaagagcattactttcgaactacctgctgctgatcttaattacatggatattgataatcaggtgaaacgtgcacaagcagtgactattatggttgctgatttagcggagaaaatcactttatcgatataagcggggaataagaatgtcatctgttagagaagtcgctgaattggccggagtctcagtcggaactgtttcacggtatctgaatgggcaacagcttaaagcagctaatcaagccaagattgcagcggccattgagcaactcgattacaaacaaaatattatcgctaaaggattgaagaacaatcaaagtttttcaattggtttattgatgaatagtatttcaagtcgatttggcgcggaagttgtttctggaatagaacaacgcgttgagcaacaagggtatagtttattattaagtggctttagtgaccaaccagcgttaattgatcaaaaaattgattatttaatggcgcattcgattgatggtttaattgttttcttagcaggtgaagaatggcaaggaatggaacgactagcggcacttgatattccggttgtgacgattaataacccaaatcagctacgcaatgttaattcgattttattagatgaccgcgtaagtgtggcacaagtgatgcaacaaattgttgatttcggacaccagaatattgggatgattgccgctaatcaggatgattatgttgcccgtgaacgactggcaggtgctaaacagacgatggcagcttatccagacagacagttacatgtttttgaaggtgactattctcggactagcgggtaccgcggtgcccaagcattattagccgaaggtattacagctttatttgtcagcaatgataatatggcctttggtgcgctcacttatttatcagaaaatggtattcggattggccaagatttactatttggtcactatgattatgccgatgaacatcaatttggacagtggccaatcctatcgattcaaccgccaacagaagcgattggattggcagctgctaagttgttattagatcggctccaaaagaagactcagtcagatggtcaaacgattttaatgcatcatgaaatcaatggtctaaactgaatcatcgaaaagggcgagtagaataatctacttgtcttttttgagtttaatccttaggttattaatttacccgtccccgataatggggtacacttgtggtgtacattattttgcatgattattgaggagggcttggcgtggcacaaaaaatgattttggatttagatactgggattgatgatgcgttagcaattgcttatgcattgggatcatcagaagtcgatttaatcgggattacctcagaatacggcaacgttttgactgaacgaagcgttgtgaatagtcaacaaattttacatttattaggtcatccagacattccagtttatttaggggctgggcattcgacgacgacgcatgattttagcgtcttaccaattagtgcggaaattcatggtcaagacggcgttggtgagattcatctgacagagccccatccggaaatggcaactgaatcagccgttgattttatattacgtgcttgtcaggcgtatggggctgacttgagcatcgtggcaactggcccgatgacgaatttagcgttagcgattcaaaaagatttaccaactttgaagaaagttggtcaaatcgtgattatgggtggcgccttaacagtttgtggtaatgtgtctccatttgctgaagctaatatcagtcaagaccctgaagcggcggacttactctttaagagtggtttgccggtaacgatggtgggccttgatgtcacgttgcgcacactttttacacgcaccgatacggcagaatggcgcgcactcggtacaccagcagccaaagcttatgccgatatggttgattactatatcaaagcctatgaagtcacttctccccatttgcacggctgtgccttacatgatcccttagcagtcgctgttgcaatcgatcctagcttagtcacgactttcccattgaacttgaagactgagatagaaggcccgtcacgtggacgaacaattggggataatgcccgcctagatgatccagcaacgcggacggcggtttgtgtacaagttgatacgccgcgtttcttaactgaatttaaatcaagaattggacaattattagcgcagtagaatgagccatatagaatttcaaaaaagagctacgacaaaagtcaattttttgtcgtagctctttttttattgtacaggcgactagcaagaataagtcggctaacatgtagtgtgaatcatgattgctgagccagtcaattccttgattggcgatggcaaaagctttttgaaagtggtgatcttgatagagtgccagactatacaggtagaataagatattaatgttctcgtcatagtgcgtgaaccgccctgcattcacaattgcgaggacgtgttcgaagtcagtttgattagtatggggtgtactcttaataaagctgatactactgagaatcaaaatctcagtaggcgttaaaacttgttggcgcggtgtaaacgtatagtcgagtgccatttgtagttcccgtaaactatccgtggttgtatgaagttcttggaatactgcgatgccatgatagtagtagtaggtctgtaaatcggtcgccagttcaaggtgttcggccaagccagtcgcatccaaataatctaacataccgcgataatcgtgtgcattgcacagttgtttaatttgttgattgaattcgggttgttgatcaatttcgggataatgacttaacagcgcttgttctaacggcatattaagccgttcgcagagttttgctaacaaaatggcgtttggaatataagtgccgttttcaatatgactaatcatcggttgcgaacaaatatcctgggctaattgatgttgggacaagccttgcgcacgacgaaccgtagcgagtttacgccccatggtcgcggcaagtagattatcgggaatagctggcactactaacacctcacttcatatgattgctttaaatttaacatgcaattttcaaaaagaaaaggagctggactgcatgccagtattgattattatattagggtttgcgtttattttccaaaagccattagtgtctgcagttaccattgtgtttggcgcgctattgggtctttggttactcagaggaataatcgtcttgatgatgttgataacacttggccattattggcgtcagaaaaattaaaaaagaccgctgaataagcggtctttttgattgcttagaattgatagtccgggtcaataatcaaaacgggtttgattgtttcacctttaatagaggcttcgttggcagtgttgatgtcttcgaattgataaaatttttcggttttatcaaaggggaacatgccttgacggtagaattcgattaaacgagggacgtcgatttgcggaatggagtcacccatgttgacgccgacgacggatttgtcgttgacacataagtcgttccaagtatcaagatcgatgtggtttggggttacggcaattgttgctgacaccccaccttggcaaagcgccttaattgaatcttccatgactggtgtaatccccgtggtatcgacacagaagttcacgccgcgcccatttgtgagggcttggattgctgcgacaacgtcgtctgtttgacgactgttaatcgtatcggttgcaccgagttctttagcgagtgcgagccggtcgtcgatgatatcgacagcgatcactttcgtacaacccgaaattttaccggccatcatggctgcgagtccaacagcaccagtcccgaagacggcgattgtgtcgccaggttttggttttaaagtatttaaaacagtgccactaccggtcacgtatccacaaccgagtggtccgagtttgcgtaagtctaaatcgtcagggactttaaccgcatttcgttcgcggacaacggttgtggttgtgaatgaagattgatcgaacatatcggcaacgtgatggtcattttcagtaaagtgggaactaccatcagggcgcacgccggataagttattttctgcgtagttgaggcattgtgttggaacgcctttgagacagttttcacagatgccacatgcgtagaatgagagaacgacatggtcgccaacttttaaactttgaacgtttgaaccgactttttcaataattccggaaccttcgtggccgaggacgattggatagccaataatggcgtcgcctttacgaagcgcttcgtctgagtgacaaatcccactagccaccatgtggacttgaacgtcgtctgggtggagtggtgcgagttcgatgttatctttaatgacaaatggtgcgccttgttgttcaacaacagctgctttaattttcatgcaatgaccttctaacttaattatttaattcacaagattattatagcgttggtgaaatcgttttcaattaaaaattgacattggcgctaaaattgccaaccatgttgttctaagtcccactggcgcttaggcagaccactcacatacgggttaccagcgacataatagcgataaggaagttgaccactcgctgctttataattgaccccgattcgtagcgcggtgacaattgatttggggtggcgacgatgcgctaaatcaatcattaaaggggcgtccgccacattttgaaaagtcagttgtttatcgtgaatgccgagggcgcccattaatttaccggggccgttagtcagttcgacgccaggtttcgggcgattgaggcgcatttgttcaatgccatgggtcggttcgatggcgcgaatcaagatgccttgtggttgatccactgcttgggtcacgatatcaaatagaaagaaaccgcgtaattgatagatataaattgtaccaggctcatgatagagcggctcgctaaagggtgtgcggcgcccattgtaagcatgcgcggcagtgtcatcggtgccgacataggcttctgcttccacaatgaggccgccaagtgtgccttggtggctggtataaagcaagtgagttcctaataaatcttgcgcgatggcttgggtagaccggttcgtaaaaaatgatggtgctgctggttggcttgttgtcataattaaaacctccgagttaaaacgaatcagctttattttaacaccaaagacatgacatttgtcatccgtaagtcatgacaaaatcgtctaacgacaaaacggaatcacttctatactagggttattaaatgaggtgatgacaatgattgaaattaaacaagtgacaatgcaattcgaacaacaagttgttttaaatcaggtagacttaagtgttcaacctggtgagattgttggcttagtgggtgcaaacggcgccggcaagtcaacattgattaatttaattttaggccgactccaaccaacggctggcgagattcggattttaggtcagaagccaacggagaaagaacatttcaacttattgggtgcgatgatgcaaggaaatgtccgactggctcgggtcagtgtcatcgaagaattagaattggtttgcagttattatcaacagccacggtcagtcgctgaattattaacgctagctgatttgaaggcacaggctcataagatggtgtcccaactttcaggtggtcaattacgccgcctctcctttgctttagccatggcaggcaatccggatttgctatttttggatgaaccgaccgttggaatggatgttggcagccgacaaaaattctggcagcaaattgaacagttaaaagaagccggcaagacgattattgtcacgtcgcattatttagaggaaattgaacacattgcaacccggattttattattgaaagatggccagttccaattcgatggtgacttggcaacattacaacaacaatttaaaggaacgcagattcgttttacgactgatttaccagcagctacttttgcaaaatggccaggcgtgatccgcgtgacgaagactggggccaaggtgctgttgcaagttaccaagagcgatccgatcttaagtcaattagcaccaatgatggggatccaggttcatgatgtgcaggttcaagcaagctcattaaatgaaatttatagcgaaatgatggaggactaaaaaatgcaaacaatgatggtacaaacaaaaatagactttaaacgcgcatattggcgtaatccacgctttgttattttttcactcttaatgccgattgcgttttatctcttgtttacgaaagtaatgaaacagggtgtgatgaatgcagcattcaatcgacaatacatggtcagtatggcgacctatagtttagttctcagcaacacgtttactttatcgacattactttataatgacgcacgggatggcttggtttccttaattgatttatcaccaaccagtcatcggacttattatggggctaagttgttgaacttaggcttaatcaatgctttaacgatcggcgtcattttcatagttgctgggattagtaatcaaattcatttagtgtggtccagttggttattaacggcgggctggttgtggtttgccagcatcctcctttgtttaattgggattagcatttcatttttaaaagatgaaaatcagattcaactggtgtctaatttgttagctttccccttagcaattttagggggattatggtggccaacagaaataatgcccaaaacagctcgcgtgattggcaagcatttgccggtttatccgattaatcatattggccaagcgctgattgcgcatcaacccgcacacttgggtgaatatggcatcacgttgctctgggctgggttattactggtaattgtcgtatacttaaaccatcataaaagaggagcgatgcatgcatgaatttttttaaacgctacattgccatgccaccccaatatggcttatttccatatgtttggttgattttcttgctctttccaattggttatgcgtttccgtatcaaacggttaagcagcaagcgattatgggcttgattctgattttcttggtggcttatcgcaatgggtatgtcgcatcgcggtatcgcacattctggattatcttacaaatggtgaccagtgcgattttagcagtcattatccaggcgttttatctgaatatttatactgcctgggtgtttggttcgattcccatgcgccgccgaagtttctggcgctattactacgcttatctgttgtcactaatcataccagcggtcaccctatattggtattatggtggtcatatgggacgcgatgatctgattggcttaatggtgtacggcttgttctgcatcttttcaccatttgcggctagctcgattcagcgttttaatcggaaaaatcgccaattaacgcagaccaatcagcgattaaccgatatgattaagcagaacgaacggcaacaaattgcacgggatttacacgataatttaggtcagtcattttcaatgattacgctaaaagcggaatatgcacgtaaattattggcgaaaaaaccggccgcggtacccgaacaactactcgagattgaacaagcctcccgtcagaatttaaaaatggtgcgtgagattgttgctggtttacgccaagtgaccgttgctgaggaattgatcaatcaagaacggaatctcagcgttgcaggcattttactgctgactaaaaatgaagaccaacttgaagggattccacaacaaaatcaacaagtgcttgcgcaatgtttacatgaagccgtgaccaatataattcgctacagtcaggcaacggagtgttacgtggtttttaatcgaaccgcaacgacttttcagatgcagattgaagataatggtcgcggattgaaaagcgaagatcaatataagagtcatgggattgtgggcatgcgcgaacggttagaaacgattgatggagggaagggcatgattaaactttatttggcagaagaccagcaactattgaataccgctttagcgggcattctggatttagaggatgatttgacgatggtcggaaccgccgtcaatggacaagtcgcacttgatcagattgaaaccctccaaccagatgttgttttgttagatattgagatgccgggcatgacagggcttgagattgcgcgccaactacatacgcgtcagccacagattaaggtgattattctgacgacttttgcccaaccgagttatttcaagcaggctatcagcaccgaagtggcagggtatctattaaaagatggcccgagtgatgacttgattgtggcgattcattcggtcatgaagggcaaagttgtttatgcgccagaattagttgttgggctgacaacgcaaacgaagaatccactgtctgagcgggaaacggaagtattgcgtgcgattgctaatgggttgagtacgaaacaagccgccgaatcattatttttatcggatggaacggttcgcaattacatgtcgacgattttaagcaaattggatgcaagcaaccgcgttgaagcaattcagattgcacggcataatggctggctgtaagaggcagtaaaattgcctctatcatgattgttctctatgatgaaagcaaacaaggaggacgaaacaatggcattagcaaatttgcataaatgggcgtttttctatttttcaccagacttttcacctgaacaaaatacggtgattaaccgtaatccaatgggaacgtgcgagatgattaccgtcgggttcgatccacgtgctaaagaagatggttcaattattgaagtcgctaagcaattgaaggcagaaggcattcaatttattgaactctgtgggggcttcggaccaacctggacgactaaaattaacgaagcactagacttcgccatcccagtcggagcagtcatgtatggtccagaattcagaaaacaattgtttgaaataatgaactaaagagtgcgtcaaaagcgggtatactgcgagcattagcctaacaaggcgaatgattgctgaaagcaatcatttgacttgtgtagctaagcacagcagtatgcttttgaaagcacgtttcgaataagagtgcgttcaaaccgtttatgttctgaggattagcaaaattagacgaaaaagcggtgaagccgcttatttggctaattaggctaaacgcaggaacatggtttgaaaagcacgtttagaatgtgccgtcagtcgagaattccgtctaattaatattgtaggcctttgtaaaagttaattttacaaaggcctctttttttaggcttattatttaacttttgactgatgatttggtatactctacttattaaatgtaaggaggcgtgtcatgcaaagagggcggcagttcttaaaacttagtgttagtgcaatttttatattcggggtgttcttattatgccaagtttcgggggtgcaagccaaacaggttcttcagcttggcgcgcaagcaccactagataccattgatatttcgacttcaacgggatatggtcaaacagggaacatttatgaaagtttattccggcttggtgagaacggtaaaattgaaccaggcttagcgaaatcgagttcagtttcagctgatggtaagacgtggacatttaaactgcgtgatgccaagttcagtaatggtgacccgattcgggcgcaagattttgtctattcatggcaacggacattgaaaccagaaaccaaatcaccttatacaaaccttttcagtaatatccaaaatgccccagcgattgcaaaaggtgagatggcaccagaccaactcggcatacgggcagtggatgagcacacgttggaagtcacattatccacacctgtggcctacatgaaaaccttgatggcttatccattatttgccccacaggatcaaaaagtggttgaaaaatatggtaagaagtatgcgacgaatgcgaaatacatggtgtactctggtccgtttaagttagttaactggaatgggacgagtgagaagtggcaatttgtgaagaacaatcaatattgggatcgcaaaaaggtaaaattagaccaagtcaactataccgtgttagaaaataccagcaccgcgctttatctttatcaggaaaagaaactggatttaacccagttagataatcaacaaattgataattatcgggatgataaagcattccatagatatccttatgcgttgacgaactacattaaatataacttcaaatcagcagatgaacagaaaaaagcacttttgaataaccaagactttagattggcgatttcgttagcgattaatcgtaagacgttgaataaccggctattcggttcgaagaaaaacgatattactggtttcgtgccagtgggcttagccgactcccctaagaaggtggactttgctaaatcacaagccgtgccagataccgtggattacaatcaaaaattagcgcttaaacattggcatgaagcattgaaatcgactggtcaaaagaaagttgccctcaccttaacgcttaattccgatgatgccaacgcgtcatatgttggtcaatatctcaaaggtcaacttgaaaaagtcttaccaggcttcaagttgacattaaagaccgtgccaagccaagtttcagcgagtcgtgataaaaaaggcgactatgatttattactcgcaggttggggggcagatttcaaagacccaatttcgtttttagaaatcatgttaccaggggctgcaagtaataccggtggcttcgacaatccagaatacaaagctgcccttgaccgcgcaatgaatgccgatgcgaacgatcctgacaaacgttgggcggacctcgtgacagctgcgcaagtcatgaataaagtccaagggattacaccactctatcaaaatgatacggcatacttgaagaatccaaaggtcaaaggcgttgtgcataacacagctggcgcacaatggagctacaagacggcttatattaaatagcgtgtgaataatcagccagttatagcctgaggattaacaagaaaggcgccagtccaaaatctattttttggctggcgccttttttgtataaacaaatcattatggttctgaattttgctgtgctaaagtaagggtattcaataaaagaaagagggaccttaaatggcaaaacaatatgaaacaacgatgattaatgaagggggccgcaatggcttcgtttattcacccgatcaagcaaagaaatatgtaatcaagtcaccagggacagacccatcagggaagagtacaaatccagagcaactctttgcagccggctatagttcttgctttaacagtgccttagatgttgtccttaaccaagaacatattaaaggcgaacccacgattaaggcgactgtttccctttatagtgatggccctgccaattattatattggtgttgatcttttcggtcacatcgaaggtttatcagaagaagaaacaatgaagtatctcaaaaaagcagacgaaatttgcccatactcaaaggcaactcgtggcaatattgacgtcacgattaatgtgatgtaaatcatcaaaaaaaaaaggaatcagcgactgctgattccttttttggtggttaagctttcgatgaatgtggtttgccttcttgtttgaggacggattgcacggctgggtcttgtcgcatgtgttgatcaaaacggtccagattagggaagtcagtcaatgaaaatgcgagtcgtcgataccaattggtcatgacgaatagataagcatcaggagcactgaattgattagcaactaagaaggactggtccgctaacgctttttcaacataagcaatccgtgggaaaacccgtgaatggactaaatcttggctttcgggtgtattagggagccaattacctttacgaaatggtgagatgaagttcttatgcaattcggtggtgatgtaattcaaccacatccgttgttgccagtattgttcagtggcatagtcggccattagtggcagcggactttggtggctaatgtattctaaaataacggcgcattcagtcatgaaatcgcccgattcagtttgtaaggctgggacgtaattcttctgattgagctgatgatagtcaccaagtgatgtggtatgggtatctaagttaactggcgtaacggtgatgaattgcaatgatggtggattataatggaattgacgaaagatactgtaattgcttttttgaaagcgttatagtaacgttgattaaagattggggggatcagtgatgagtacgaaagactattttaaattttttacgagcaccactttgacgggcgataataatcgtgcgtatttgatgacagtgacgcgggcaatcaattctgagcaattgaaaagcgtgctggggaatactgtgacttattttaatcagtacggtgacggctttccgtttacttcgccgtttacgattgaccagttgaatccaatcgtcactgaacaaactgatttacaaccgactgaatttacgattattaaccgcgcaggattacatgggattggcaatattcttgcctaaaaaagggattgagacaaacgttgtgtttgtctcaatcccttttctgatggtcaaatctaattgtctaagcgtgctcgggaaatcccagacttccgtcacactcttttaatttctagcatatttatgttcatcggtatagctgaaaaaatcggctttggcagtataatcaccgcgataaacgccgttccaaccagcacgttggccaaacgcgcctaaatcaatcaataggtgttcttcatccttggtgagatgaatcttgccaaagccaacactatagatgtaattggccaggcgattgacgagtgcctcgggattcttaaccgtatcaattttgaggtagacctgtagtaaaacatcggtaatatctaacaatgcatttgatttatccggatgcgccattagactgttgtaaagtgtatggatgttttcttttgcaattgattgacttatcatttatacccctccaaataacaataattcacactaattatagttccttttagttatttgtcaataatgtagataagcgttatgattgtctcaacagttgattaagagtaagggacgattgaatatgaaatggtatgtaggtggacaggaacgtgggcatcgagcaattacaatgattaaggcattattaaacgacttgaaacaagatgaccaaacggcaccattacaatcagttttgcgtagttatcaaactgaaattgaagcacaaacgacagcagtaccattaattttgagccgaatgaacatcgcaattgcgaatgtgattcaaaaagaaggcttggatctatcagccagtcaacaagctaagttaaaagaaatgacggcattatcgatgattagatatggttattagtttagtaggggatccagaaagaaattgttgaagatcggaacgttatgccatcggattagcttttttatagttttattgatattagtgatgttcgtccatatggaagcccttttcgggttgagtacaaattatatgacgacgcatgaaccagcattgattactgttaattttggggtgtggctaataatagtctttttgtttactagaatttatatgagacaaccaaaacctgactggcaaaatgtgtaaagagagccgatgctaaagaaagttgtacttattttagtgatgtttggtatcgtgctagtgattgattggatcgataaacgttggaacccattagcgctgccggagaatcaagtctatattaatgagctaatgaaggctgttccgattttgacgacactcagcaatgatttgtttgcaccaacactagaagaattattatttctggtattttctttaatctcttttttacctcaattgtcaagttaagtgcaacactaatggcctattcttataattggtctagaaagttaaaccagttgtggcataacatccgctggacaactatagcttaaacagcggcggggacggtgattcagcgtgtcttgaaccaactgcagatccactaatgagaggtttttaaaggaatacccctttgggaagaactctcttaattgaccattcacattctcattagtgccccgttcccagggagaatatggatgggcaaagtagatttccgttccttgaacctgatttaaactagcgaattccgagccgttgtcaaacgtgatagtccgaaagttttctgcaccgtaatcatcaatcgtatcttggagggcttgccggcaagtctctgcccggtaatcaggcaatttaacgataatttccatccggctaactcgctcggttaacgtcattaaagctggttcggactcaacccgtttggctttcactaagtcgccttcccaatggcccaactcctgacgtttccgaaccactgcgggccggtcttcaatggactgtccaagccgttttttattcaggcgggcatgtcggtgattcgggcgtttaacgcggcgacgtagcttcatgggtaaatcatagttgtgaagctccgggagcttgccagcctcgatataccgatagaccgtagccgttgatgggcagggaaagcccgggtaatgagctttgaaatagtggacatacgtgtcgacactgaaaactcgtggcttagcttttaaagctttcggcagggacttgaagaacacggcagcccgctgcagtaaacctttggggtgacacttggcccgctgttctcgatagtaagccgccccgcgctcggcaaagtagccctgatatgaccgatgtttctgggaatcaatctgggtggttaacccgcgttttaattcgcgagaaatggtgctgggactccggtgaagccggctggcaatctgacgaacgccaaatcctaatcgagtcagggactcaatttgaccgcgttcaaaagattggagttgttggtaatgcttaggcatgatattcttagtttgggtcatgaagacacctatccttatctgttgattttgtcgttaataataagaataggccttcatggccttttaagctagtctaattggtctagttatcaagtgttgcacttcaattttaaatcggggaatctcttttttattaaaaaaacgaatgcgatacggtgatgaaaattattgtatcagggcttgcttttgggtgtgcgcatcagctgaaaattgactataattggcttatttattgttcatttggatggatattgggcagtacctatttttggacgaaggatattagatgttcaatagtgctccatatgctcgttaatctatttttaatagcacattgtagataaaatgatttaaatgaacgattataatgacagctaaaaagttaacgactgatttggtcatgttgaacacctcatcattttatttcatggctactctagtgctatcttgctggttaaacaactagaatgagaacttaataaccaccaaatgaaagcgttctaatttaaggccgttttgttttgacaatgcttgataagtggcttacatttaattgtgaaggatagcacaacctatccgcagacatttgtgtcaattcaaatggaagaggtggccagaatggcaacgaatcaattagtattaaaaactgcagacatttgcgatatccgggatattgaggaagcacgggcaaccattaaaccgtatattcgcgaaacacctttaattcaatcgatgttcttgagtcgtaatgtggcgcacggtcatgtctatttgaaattggaaaatatgcagctgacgggatcgtttaaattccgtggtgcgaacaataaaattaaccatttaacgccagagcaacgggctaaaggcatcattacagcttcagccggcaatcatgcgcaaggggttgcattgaccgcgaagttattagggattgatgcgaccgttgtgatgccagaagaagcaccgcttgctaagcaacaagcgaccgccggttatggggcgaacgttgttttacatggtacgacttttaatgattcgcggttgtacatggagcagttagcagccgaaaagggcttaacaattgtccacccctacgacgatcgcgaagtcatggccggccaagggacaatcggccttgagattttggatgcgatttggaatgttgatacggtgattgtaccggttggcggtggtggcttaatctccggcattgcgacggctttgaaatcctttaacccctcaattcacatcattggggttcaatcggaaaacgtgcacgggatgacggcttcatttgaagcaggcacaatcaccagccatcatgcggacttcacgctagccgatgggacagacgttgcgattccaggtgaactgactttcccagtggttcaaaatctagtcgatgaaatgattttagtttccgaaaaagaaatcgcaactgcgatgaaggatctcatgcaacggactaagattgtcacagaaggcgctggtgcattaccaacggcagcactgctgagtggtaaaattgatcctcaatggttaacagataaaaatattgtggctttagtttcaggcgggaatgttgatttaacccgcgtttcgggtattattgaccaactcttccacccagctgatacaagcaaaggggttgttggataattaaaaagccggcatccgtctaaaaacggatgtcggcttatttttgtgctgcaagaaaggctggaccatgatcgtcaattagggcgtgaaattcttggcagtctttaacagtcatttggggtaagagctgtggttcaataacctgttgtacctttaaatagtggaggtcttttaaagaacagtgctctaggtgagcaattaagcggcgggcatataaatcagcgataaagactgggcggtcgaagacatataataaaatgacatcggctgtttccggaccaatgcctttgatggcaagtaactggcgccgtaggtcagtggtggttgtcatctgattgagcgtgtctaagtcaaaatcaactgtcgctaaaaatcgaaacagccctttaattgtcctgcttttagcgttattgaagccgctgggtttaatagccaacataagggcttcatccgaaagagaaagcagattgtttggctcgaagtgcgtacttgatcgtagattggcgagcgagcggtcaacattttgccagtttgtattttgaactagaaccgcgccaaccattgtttcccaatgggaatcagaaggccaccagtgttgcggcccatattgccgatacattgtttgaaagagttggtagtaatcaattttaccgttcatgaaaaatgtctccttaacataaaaagacgctacttcacctttggcagtcacttattgtcaattcgcttggtgcgcagttgtagcagtttggaagttgtggctaatgagatggtggtcaaaatgatgaaaaaagtggttgaaagtaagaaacgcggcatctgcgcctcagaaaattttaaaataatcgtggtaagggtactaaaagtggtgaggatgtttaaaatcatgagtgaaatttcgtagttgcccgattgtttcgaaatgacgtggccagcgtataataagccaacgccgaacaatatatatgagaaatagaaaataccgaagaaaacgatgagaatagttaatgattctttggcgtagacgagaatatcggtactggtaaagatgcgaatcaaagtatttagaatctgataggtgagataaagtgttgctagatagataaaagtggggaagtttcgtttgataaaggccatagcaatctccattgtttttttattgtaaagcttgtcactattctagcatggaatttaagaatggtcagttgaaagtcagccgagaatgcgtttttatttgtaattaatatcatatgcgttatacttgagttgtgtaaaatagaacaaggagtgatcaatgtgaaaattatcgttgtcggttcatctcatggtggatttgaaacagttcaagaaagtttactcgattatccggatgcaaccatccaatggtacgaacaaggcgatttcctatcgttcttatcctgtgggatgcaactctatttagaagggaccgtcaaaaacgttgatgatgtcagttatgcgacaccagaaggcatgcgggcaaaaggggttgaagtcaacctacaacaagcaatcaccgcgattaacgccgatcaacatacggtccaagtgaaggatttaaagaataatacaacgcgtgaagaaagttacgataagttagtcttgagtgtcggcgctgtgccatttgaattaccagtgccaggccgtgatttagagaatgtctacgcaatgcgtggccgtgattgggcgattaaattaaaggcgaagacagttgatccaaccgttaaaaatgttgtggtgatcggttctggttatattggcattgaagcggctgaagcatttgctaaagctggcaaacatgttacagttgttgatgtcttgccacgtctattaagtctctatctcgatcaagaatttacagatcaattaacggctgaaatgcaagcgcacaatatctatcctgcagttggtcaaggcgtcaaagaatatgtcggcgttgacggtaagctaactaaagttgtgaccgatcaagctgaatacgatgctgacttagtcatcgaagctgctgggattcggcctaacacaggctggttaaaagatacattacaactcgaccgcagcggccggattgaaatcaatgaattcttacaaacaagccaacccgatatttttgcagtcggggatgcaacggttgtgaaatacgcaccaactggcaaagaaatgccaattgctttagcaacgaatgcgcgtcgccaaggtcgctatgctgctaagaacttagtcaccgccaaccaaccggtacccgctgtttcaggttcatcagcattgagcgtcttcgattatcactttgcttcaactgggattaaagaaggaacggctgataaaatgggtgtgaagacccaatctgttttggtttctgaaacatatcgcccacacttcgtccctgaagcagaaaatccagtggtcgatttcaaattaacctttgatccagaaacacggcgtgtactcggtgcgcaaatcatgtctaaagctgacgtgacggcaaacatcaacgccatttcacttgccattcaaggtaagatgacaatcgatgatttagcatatgctgacttcttcttccaaccaggttttgaccgtccttggaacatcatgaacgtcgccgcccaaaaagcacaacgacttttagacaaataaagtgcaagcagctgtcaattgaagattgatggctgctttttgtgctgacatggttcgccaaataggcttgatgaagacggtgattgtcattggattcgtgtattcagctggtgtattgctcttaacggggcttacgcttggctattcaagtgtaagacgttggcttagaaagaatcgctaataaaaaaggattggggatcgataaaaatatcgattcccaatccttttttactatattacccaataccgatcacataatatgcgagtttatcggcgtagtgtcgttggttattttgttgtttagcttgcttaaccgcggtgagattgtcggtgaccacgccgtctgcaccgaaatacatcatgcgttggacggcttgttgatcattgggtgtccagacaaagacggccttattttcctgatgtgcagcttgaatgaagtgactgttgacagttgtcatttcaacggcataaaaatcagcgttcgaaattggtgggccgataaaattaaaggggagaatgtagcccgtttgaatcttcggtgctgcctttttaacggcctcgacgatgtgccagtttaaggattgcaccatgtgaccgtgagcttcgatattggcctgatacttattcaggaaatgttgcaccaagccgggattatcggtggtgggtgtcttaatttcaatcagtagtttttgatgaagctgattggcgcgtgcaagatagtcatcaaatgaagcaattggtgcggattgccgatgttcatggacggtcattttagtcagttgcgccagtgttttagactgcggggtccctgagtgcccagtgagtggggcaagttggaagtcgtgaaagacgacgaattggtgatctttagtcaattgcacatccatttcaacataatcgggctttaatcgggtagtttttcgcagcgcactaatcgaattttggacgccgtctttttgcgaaacgccacggtgggaaatgcttagcggctgctgaatggttactgaacggagatagtcccaattataagtcccaacgccgattaaaacgcaatttgctacgaataataaccaacgaccactgagcggcacgcttaattttaaggttgcatagttgaacgtcggttgcacaaattgtgggtcggccaacaaataatcaatgacgatgaaaaagacggcgactgtcgaaagcaccaagttgatgagcatagcagcttgcaacaaggtcatgatgaccacggcacttggcagtcccactgatgtgtgggtttcaatcaacgcttgtagttggatgagtaggaaaaaagtgagtcccgtaaagccaatcagtgcggcaccgattaagagtagacgccccagtaatgagccaattttttgatgtgtaaactgccaactactggtcaacgcttttttgaaagtcatctgctgaagaatgatgtttggtagggtgaagatcagccgtaagccgagatataataagcccaaatagacaagaatgaaaagtcccgcgacaattcgccgattcatgagaatataattcagaatgaatgccggtattttaaacttagtcaataaatcagaatgatagccaagcccgcccagcggtaaaattaaaagacaataatatagaaagaaaaagaacgtgccaattcgaaggtgcctgagttgcgcaaaagtcatcttcagcaatgcctgcaaagctagcggccgtttaatctgaataaagtacacacttaatagaagaaacgtgaattcgaagaaagccagcaataaaattagtagcgcaattcctacgagtgctaacagcgcaatcggatgctgatgaataagcgctggcaagttgctcaacgcgagaaactggatctgattatgtaccagaatgaagtagctggctttactcaaaagcggtagacaaattaaaagcaaaaagccatgcatcaataacacactacgaaaataggcctgggactgctttaaaaaagtgaatgtacttgtaaatagggttttaaaatactgcattgaatgggtgctcctcaattggactcgtaatgagataattgtacaacaaatatagaagcgtgtaataccgattaatctttgtatttaatgaagagtttattatagttattaagttaatagtatgaatgaaattactaaagctatcttgtggaaataatgaccaaaaaatatttaagcgcgcgaactcggaccaaacatacatatgctttttataaagagcgacggaataatccgcaatggcgcgacgattttattcaggttagatcgcaaagaagaaaagcattatttattcaaacgattgttatcctaatcataattgcaggaggcgcagtttatttttctaaagcaacgccaatgaaacgtgtggttgaacaatcagccactagttcaagcacaacagctagaactgaatcaacaaaggaaccatctgcagatccggcgattgcaattagacataatagtagcgatgaagaacaagtatcgattagtgaatctagtaatagtatggcatcaacagagtcatcaaacgacaatcatgatacaacgtcatctacaacaatggcagatgatgacgttgattatatagcagacggatttctaatggcgcctgtaaagtacaatggtgaagatgccacagaagcgatggaagcaaatcgagcgccacaaaatttaattcacgatggttatacaaacggctatattaaagatgacacgactgtgcgagtatcaagtatgggtacagcatttaatagtagttaccaaatagcagatggcgtgtttgtcatccaacttgatgcctctcagcataaatttagatattccgtaaataacggtagcgttagttttgaaaatgaaaaattggatgaaccagatggtgcaagtgttgaactccaattaaaaaaagatacaaatgcaagagaagtagttgattctcgtcagttacagaattagtacaataaaaaatcccgttagaagtattttacttctaacgggattttttataaatgatgcgtcacccgggagtcgaacccggatctcaagaaccggaatcttgggtgctatccattacactagcgacgcattccgcgtactcaacagtacaatatattatattagcggagttaagcggaaatttcaagtgtaaattttgataaatcgcgataaatcaacgtttaaaaaatattcggaaagaaaacgtattcatcaaccccaaagcattgcatctgttttctgcacttgttataatggtcttgttcaaaaggataagttactagttttagtaagttgccttttattttttgccaaccatgggtcgactaatgacacagatggacattttatgtcccacggaaagtaggcgatagcaattgcgcgatgaattatctgcaatagaagcggttgcgccagatttcgtcggtatcattaagaaacgttaccaggtgttacaacatatcgattggctcgcgccagttggccgacgaacgcttgcggaacaactgaagatgagcgagcgagtaattagaactgagacggattttctgaaagcacaaggtttgcttaattcgtctaaatcaggtatggttttaaccgtgaaggggaatgaaatcctcgatcagttaagacaagtaatggatcaattcttagggttacatcagactgaacgtcagttgagtcaagtcttaggcattgaacattgcttgattgtttctggcaatagtgatgaacaaccaaaagtcctcaccgaaatgggcaaattagtcaatagtacgttacaattattattaccacaagggcaaagtattgtggcagtgatgggcggaacgacgatggctgaagcagctcatgaactttcaactgatctatcgaaacagcgcaatctaatctttgtgccagctcgagggggaattggtgaaagtgttgatattcaggccaatgcagtctgtgccgaaatggctaagcagacaggtggtaagcatcgggcattgtatgtgcctgaacaggtgagtgagaagacgtacgcgcctttgttagaagaaccaagtgttcaagaagtgttaaaactgattgaacgaagccggggtgttttacacagtattggtgaagccattacgatggctgaacgtcgtgagatgccgattgaaaccatcaagatgcttaaagaaaagcatgcggtgggtgaagcctttggttacttcttcaatgcacaaggcgaagtcgtgtacaagattccgcgaatcggattacagattcgtgacttattgaatattccgtgtgtactggcggttgcaagtggtgcttctaaagcccaagcaatccaagcgtacatgcaccttgcacctaaacagacgtggttaatcacggatgaaggtgccgcaaactcgattttacaaggggcaaccctttaaaataaaaaatttttcatttcctaaaggaggaaattctattatgactacaaaagtagggattaatggtttcggacgtattggtcgtttagctttacgtcgtatttacgcaacaaacagtgatgtattggaagttgttgctatcaatgatttaacatcaccagacatgttagcacacttattaaagtatgatacagctcatggtcaattcaaccacgaagtatcagctacagaaaacagcatcgttatcgatggcaagaacattccagtttatgctgaatcagatgcacgtaatattccttgggttaagaatgatggtgttgacttagttcttgaaagtactggtttctacacatcagaagaaaaatcacaagctcatatcgatgctggtgctaaaaaagttcttatctcagctcctgctggtgctgttaagacagttgtttacggtgttaatgatgacacaatcacagctgacgataacatcatctcagcagcttcatgtactacaaactgtttagcacctttagctaaagcagttaacgatgctttcggtatcaaagctggtacaatgacaacaatccatgcttacacagctacacaaaaattacaagatggtcctgatcgtggtggtaacgtacgtgctgcacgtgctgctgctaacatcatccctcattcaactggtgctgctaaagctcttggcttagttgttcctgacttgaagggtaaacttgacggccacgcacaacgtgtcccagttatcactggttcattgacagaattagttgcaactcttgacaaagaagttacagctgacgaaatcaacgctgctgttaagaaagttacagaaggcaaccaatcatttggttacaacgatgatcaaatcgtttcatcagatatcattggtacagaattcggttcagtattcgatcctactcaaacacaaatcgttggcggtggcgcaggccaagttgtcaaagttgttgcttggtatgacaacgaatcaggctttactgctcaaatgatccgtacattagaaaaatttgctagcttaatctaatttcacttttgtgaacttaggaatgcgatagcattttataaggcgggaggaggtaaactccttccgcctttttttatgaaaatctaggaggtttgtccacatggcaaaacaaacagttgcagatttaaaagatattaaaggcaaaaaagtcttagtacgtgttgactttaatgtaccaatcaaaggcggcgttatcggtgacgataaccggatcgtagctgctttaccaacaatccaatacatcatcgacaatggtggcaaggcaatcttactttctcacttgggccgtatcaagagtgacgaagataagaaagaattgacattgaaaccagttgctgcacgtcttggcgaattattaaacaaagacgttgctttcgttgcttcaaacgaaggcaaagcattagaagatgcaatcaatgcgatgactgatggtcaagtattggttatggaaaacactcgtttccaagacatcgacaacgactttggcaaacgcgaaagtaaaaacgatcctaagttgggcgaatattgggcatcattaggcgacatgttcgtaaacgacgctttcggtacagctcaccgtgctcacgcatcaaacgttgggattgcaacagctatgaaagctaataacaaacctgcagttgctggttacttattagaaaaagaaatcaaattcttgggcgaagcagttgacgctccagaacgtccatttgttgctatcttaggtggcgcaaaggtttctgacaaaatcggtgttatcgaacatttattagctaaagctgacaaagtcattgtcggtggtggtatgacttatactttctacgctgctaaaggtttatcaattggtaactcattagttgaagaagataagatcgaattggctaaagaattaatcgaaaaagctggcgacaaattagtattgcctgtagataacgttgttgcagacgcattctcaaacgatgctaagacagaaattgttgaaggtaacattcctgatggctacatggcattagatatcggacctaaagcaattgctgacttcgaaaacgtccttaaagatgctaagactgttgtttggaacggccctatgggtgtgtttgaaatggacaactttgctaaagggacattggcaatcggcgaattcttaggtaacttatcaggcgctacaacaatcgtcggtggtggcgattcaacagccgcagttaagaaattaggcgttggcgacaagttaacccatatttctactggtggtggcgcatcacttgaatacctagaaggtaagacattacctggtatcgctgctatttcagacaaataatttaaaattaaaaggagattttctcatgcgtaaaccaatcattgctggtaactggaaaatgaacatgaacccaactcaaacaactgagttcgtgaatgctatcaaagccaacttacctaagtttgatcaaacagaatcagttatcggtgcacctgctgttgacttacctgctttattagaagcagctaaaggcacagacttaaaagttgctgctgaaaactgttacttcgaagatgctggtgcattcactggcgaaacttcaccaaaaacattgaatgaaatgggtgttgattatgtcatcatcggtcattcagaacgtcgtgattacttccacgaaactgatgaagatatcaataaaaaagcacacgcaatcttcaaaaacaacatgacacctatcttctgttgtggcgaatcacttgaaacacgtgaagctggcaaagctgaagaatgggtttcaaaccaagtaacagaaggtcttaaaggcctttcagctgaccaagttagctcaatggtcattgcttacgaaccaatctgggcaatcggtactggtaaaactgcttctgctgaccaagcacaagaaatctgtgctgttgttcgtcaaacagttgctaagttatacgaccaaacagttgctgacaaagttcgtatccaatacggtggttcagttaaacctgcaaatgttaaagaaatcatgggcaaagaagacatcgacggtggtttagttggtggcgcaagtatggaacctgcttcattcttagacttagttcactttaacgactaatttttaacgcattcctgtttacgaatggcgtaaaattagctaaaatagatgtaggctttgcctgacatccaaaaaagcgctaatgcttagcattagccaaaaaaggagaaaattacatgtcaattattactgatattttaggtcgcgaagttttagactcacgtggcaatcctactgtcgaagttgaagtttacacagaagatggcggctttggtcgcgcaatcgttccttcaggtgcttcaactggtgaacatgaagctgttgaattacgtgacggcgacaaatcacgttttggtggcaaaggtgttttaaaagctgttgaaaacgttaatggtcctcttgcaaaagaaatcattggtttcgacgctacagatcaacgcggtatcgatgctgctatgattcaattagatggtacagaaaacaaaggtaaattaggcgctaacgcaatcttaggtatttcattagctgctgcacgtgctgctgctgacgaattaggcttaccattgtacgaatatcttggcggccctaatgctcacgtattaccaacaccaatgatgaacgttatcaacggtggtgctcactcagataacaaagttgatttccaagaattcatgattatgcctgttggtgctaaatctgtacgcgaagctatccgtatgggttcagaaactttccaagcattgaagagtcttttatcagctgacggtaaagttacttctgttggtgatgaaggtggtttcgcacctgacttcgcaaacaacgaagaacctttacaatacttgatcaaagctattgaaaaagctggttacaaaccaggcgaagatatttcaatcgctatcgacgttgcttcatcagaattatggaacaacgaagacaagacatacaaattacgttggtcaactggggaagaattcacaacacctgaattcgttaaataccttgaaggcttagttgctaaatacccaatcatttcaatcgaagatcctatcgatgaaaacaactgggaagactgggcatcaatcactaaagaacttggcgaaaaagttcaacttgttggtgatgacttcttcgtaacaaacactgattacctacgtaagggtatcaagatgggcgctgctaactcaattcttgttaaagttaaccaaatcggtacattaacagaatcattagaagcaatcgaaatggctaaagaagctggctacacagctgttgtttcacatcgttcaggtgaaactgaagatacaacaatcgctgacttagttgttgctacaaacgctggccaaatcaagacaggttcaatgagccgtactgatcgtttagctaagtacaaccaattaatgcgtattgaagaacaattaggcgatacagcttcatacaaaggtatcaactcattctacaatatcaaaaaataattgaatatgttcgtgtcggcacattttgaggtttaacagcccgcgttaaaggattatgtttgtagtcttttgacttagggggttaccattgaatatggcgagcaaaacatatctagtaagagcatcttttaattaagatgctctttttttgtgcgataaattgaccggataaggtaatggattggattaggctagcaactaaataaacaatccccagcataaccggttgattaagaaaagcttatggagcattgcgcaataattaccagaataatcttgcaaataattacgtttgcaagcggatacataaacattagactatagatagcgtagagggattgaaacgaggagttgcgataagcatgaacaaacgagaacacgctattattcaatatagtttggcccagcataaaacgtactatgtcgacattgccgcacagttacagctttcagagcgcaccattgcaaccaccttgaatgatatcgaaagagccctttaatgtgaaactcgttcgaaaaccgaatgacggtatttattttaccggggatgtcgcgacattagccaatcatcttgaaaaaaaggccaatgatcgtccccaatccaaggaagaacgctgtcattgcattctggctaaattattattaggttcagcatcgattacgattcaacaactttctaataccctatacgtgagtcggagtacagtcgagaatgatttgaaaaaggtaaagcaaaaactcgcgcaattcggtcttcaattggcaatcacgcataccggtttatccttaatcggttctgagcatcaaaagcggcaagcaacggtggagttaatcagtcagtattggggaaaacggactgaggctaaagagttaaatggacagttagtgcgccatgttcaattaccggataatctgaatcaactgtttgaaccagccttgattaaaaacatactcacagctttagcggaattaattgaaaaaagtacgctatcatttactgattacgagtttcagtcgttagcgattcatctgatgatgccagcaccaactggtggaagcaatggagcccaaccagtggtgacaccgttcattgccgaaacacagctgttagtacagattttagaacggcgatttgaattgacaattccggattttgaacaggaatatctcaaccgtcatttagtaacggtccaatcgaaggatacatctgttcaaactatccagaccgagttgcggcaatcagtcgggctgccacaactattacggcaacagcttgctcaattagcagttgatgaggaattaattcaggggttagcagttcatttaagttcggcacttcgccggcttgcaatgggattgagtattaataacccatatactgatgaaatttgccagaattttccgcaagcctttgatcaagcagtgttactaaagccggtgcttgaaaatcagtatcagattcaaatgaatgaggacgaattagcctttattagtttacactttgaagctttttttgaacgacattcagaagatgcacgcttgagtgttgtggtggtttgtagtagtggcattgggacatcgcaattattagggcaacggttggccaaaacgtttgctcaagaattacggattactcgtattattgccttgggagaactacttgcaaccccgattaaggaatcgctagtcatcagtacgattgcgattaaaggtttgtcagtgccggtgattgaagtcagtcctttgttaaatcggcatgatattggaatcattcgccagatgattactgaacaaccgacgcctaccaatcacttagtagctttattgcaacccgaactgacaattgtcacgcaagagtagttaacggatcaaggcgcaattgaattaattggtcagcggctcattgatcaagggtatgcaaagccaacggttgtccaggcagcgctggcccgagaagctttagcaagtacggcacttggtcgagtagctttgccgcatgcggattcacaattaattaccaagccagccattgggttgctgattgcaccccaaagtattaattggcaacacaacgacaaagtgcagctcgtcttctttatggccttgaacgaaactgttcatggccaaatgcgggcgatttatcatgatttagaccaattgattgaaaccccccgtcttttaaagcaagtcgcacaagcatctgatgggacggctgccctcgccatcttggcacaattgaatcagaaaaattagaatggagtgttaccagatgaaagaatttgatgttgaaaatatttttacagatatcgttgttggggatgataaaccgacggcattagcaacactagcgcaattatttgctgataagaatgggttagatcgggttgcattaaccgcgggattcaatgcgcgtgaagctgagagcacaactggttttgggaatggggtggcgattccacacgcgaaagtggcgggattaactcaaccagttgtcggaattgtcacgtttgaaactggtgttgattgggaagcattagatgacgcaccagttgaaatcgcgattgccctaattatgccgctcgatgaccctaataagacgcatttaaaagtgttgtcgaagtttgcgcgcaagttgatggatgacgcttttattcataatttgaagcaaaatcggcatgatgcaatggcactctacacgttagttaacgatgaaatcgaatttaactaggaggatttagaagatgaaaaagtttgttgggattacaaaatgtccagttgggattgcccatacttatatggcagctgaaaaactgcaaaaagccgggcaagctcgcggatatgaagttaagattgaaacacaaggcgcttcaggggtagaggatgaattaagcgccgcagatgtggctgatgccgatttcgtgattattgccgctgacgttgccgttgatggggaagaacggtttaatggcaagccagtactatatgcgaagaccgctgaagctattaaagattctgatacactgattgaaaaagcactaacggcaggtatttatggcaagaatcagccgaaaacagaagctaaacaagaggacagtcatgaacaaagtccaattattaagcaattattaaatggggtttcccatatgattccgtttgtcgttgtcggtgggttgtttattgccttgtcaatcgcgattggtgggcatccgactaaagcaggaatggtgattccaccacataccatttggagtagtatgaatcagattgggacgattggttttaccttaatgattccaattctcactggttatatcgcttatgctatttcggggcgtgcagctttagcacccgcaatgatcggtgcaatggtcgccaacaatacagacatccttggtacaaaagccgggactggatttattggtgcgattatcgttggttttgcggctggttacttggttaaatggtttaattcatggcccgtaccaaaagatttacggccagtgatgccaatttttgtcattccgttattaggggttgggattatctcagccgttttaattctcgttttaggcgcacctatttcatggttgatgacggcactacaagatatgttaacggccctttcacaaaatccagaaacgagtgtgattcttggcgttgtgattggtgcgatggtcgcgattgatatgggtggcccagttaataaagtggccttcttattcggggtggcatcgattacggctggacatccacaaatcatgggtgctgttgcttgtgccgttgctgttccaccattggcattggggattgcaacatttgttcgtcgcgatctttatacagaagaagaaaaatcagctgggattccagctatcttaatgggcttgattgggattactgaaggcgccattccatttgcaacagctaacccaaaacaagttttcccaagtatcattgctggttcagcagttgctagtgcagtcgggatggtcttcaaaatcaccgatgcagtgccacatggtggcccaatcgttggggtgttaggggcaaccaataatattggtttgttcttcctctcaattttggcaagggttgctgttgcggtcgcaattttaaccacatttaaagtacgaaaagcacggaaagcttaatcttaaaagggcacacgagtaatcggcgctctttttttgtgggtaaaaaagttatgaacatgcgcttttttgaattatataaagcgctgtctatcgaattttgataaaaactggtataatagagccaattaaggtaaaaaggggtggcagtcgtgaaaaaaggagatcgccaagcacgaatcgaacaaatcattaatcagcaagttatttcgacgcaagaggatttattagcaacgttgaaacaagatgggattgatgcaacgcaagcgaccatttcacgtgatattcgggagatgcaaatcgttaaggcacgggatgtgaacggtgagctccgctatacgatttttcacgatgacgaacgcacccaaactcagaaattaaaagataaactgcgtgaagtggctttgtccattacacaagtgcaaatgttaaacgtaattaagacgctcccaagtaacgggaatttattagcagccttaatcgatgatttggggtacccagaagttgtcgggacgctggcgggtcacgatacgattgttatcattagccctagtgaggaactagcagccgaattaaacgaacgtttcgcacaacatctagcaacagcgagataagcaaacaaataagacgttgcgacaaaagtaattttttgtcgcaacgccttattttgttgagctaaacatgttctgtgttaatcctcaggagatatccggctgataactcactctttaatctacatactggttaaaaatgtctgggatgggggctgttactgttctttgtttatccgtgaagggctctgtgtagcgcaacgtttgcccgtggagtagtaggcgctgtgttgaatcggttggaaagtacaacggatcacccaaaatgggatgaccatcagccgccaggtgcaagcgaatttgatgtgttcgccctgtttcgaggttgactgccaaggttgctgcaggtccttttcgatgcagtaattggtaatgggtcactgcggataaacctgtgatgtaatcaatcgtgcgtttgcgcttattgtatggatcgacaccaattgggaggttaatcgttgcatgttccaagagtgtttgttccggatcgttagcaatagcgatgtattggcgcgacattgttttttgactaagctgtcggtttaaaatgccgatgacgattggggttttaccaatcaagagcacgccactggttgcttgatcgatgcggtggaccatgtaggcctttttatcttgtttagcaagataggccgccacttggttcattagggtgaagttttcaccaggaccgttcggatgggttttaatccccgccggtttattgacgaccagtaaatcatcatcttcgtataaaacggaaaaagattgccgttcatcaagttcgtagtcttggaccttaacggaaacttctgagaagttcatcgtaatttgatcgccagcttcaacgtgtcggttgaaggcgagataatgtccgttgaccaaaatatcttgattaatccgcaagaaatgttgcattttttgcggcactaaccagtgattcagcaggccgcggacagacatcggactaaagtcgggcgctaaagtcacttttttttggtaaattatcattagagttcaaccacctttaagctattagtttagcgaaaattggtgtaaaagtaaattttaaaagattgttaatgtcttcgattggcatcagtgtcaattgacgaatatgctacaattaaacaagattaattttgaccgtaagaagagggatcgcatgaacaagcaagcttcgccgttttggttggcgattaaacaatttatgaaacgcgtctggcgcgtgattcgttatgtctggtatcgactacaattgacgagatggctgattctcgctgttttaattctcattttcgcgatgagcagctggctcacgtttaaagcgaagacggctaacgtcggtgagattaaggccaacttacaaaccccaacggcgctttatgacattaaggatgaacgcgcggggacgttatattcgcaaaaagggacttatgtcgatcttgataagatatcgccgcagattcaaaatgctgttttgtcgactgaagatcggaccttttataccaatcatggattcagtattaaagggctagcacgagcagcagttgggttagtgattcatcatgggcagattaccggtggtgggagtacgattacccaacaactcgccaagaatgccaagttgagtcagaagcagacgttctcgcggaagtttgaggaattattcttagctgttcagattaccaaggtctattccaaacaggatatcttagcgatgtatttgaataatgcctacttcggtaacggggtgtggggcgttcaggatgcgtcaaaacggtattttggtaagaatgcgagtgaattagatgctagtgaaggcgccgtgattgcagcgatgttgcggagccctagtttctataatccggctgaccatttagataatgcgactgcgcggcggaacttaattctcggcttgatggtcgataataacaagttgacgcaagcacaagccgacgctgctaagaaagagcaacttgtcgtgacgaatacctacgagcagtcggatgggtatcgttatccgtattactttgatgaggttgtgaatgaagccattaaccgctttgggttgaaagaagaagacctcgttaagaacggatacaagatctatactgccctcgaccaatcccaacaaagtaagatggaaaccacctttaaacaaaattggttgttccctgataacgctgcggatgacaccttagttcaaggtagttcagttgcaattgatccgaaaaccggcggggtatcagccgtcgttggtggtcgtggtgagtatacaatccgtggttatagccgcattacacagatgaagcgtcaaccgggatcaaccatcaagccattggcggtttatacgccagccttagaagatggctaccactatgattcatcacttgaagataagaagcaaagctatgggactaaccactatacaccaacgaacccggataacgtttataccggatcgatgccaatgtatcaggcgctagccaacagtacaaatgcgccggcggtttggttattaaatcaaatcggcctcaaacgcggcattaagtcggtcgaaaaattcggcatttcagtacccaagagtgaccaaaacttggcgatggctctaggtggttggcaaggtggggtttcaccttaccaaatggccagtgcttatacggcttttgcgaataacggtgaattgtctgaaacacattttattcggaagattgttgatgcgagtggcgccgtgattgttgataataccgaaccatccaagacacggattatgagccaaaaaacagccaaagaaatgactagcatgatgttgggcgtttataataatgggactgggcgttatgcgaaacccaacggctatcaagtcgcagggaagtctggtagtactgaagtgcctgatagttatggctttgggaccaaagatcaatggttagtcggttatacgccggatattgttgttgcgacttggatggggtatgacaagacggatcaagatcactttatgaagaacactagcattgacggtttagcaccaatctttaaatatgagatgcaacaactcttaccaaccacagcacagacggactttgatactgaagatgctcaatcgttggcgaaaaaagaacagagtgggacatcgaacgaattagtcgattcaattgaatcgggttttaaagatgggataaataaagcgaaagatacagccaatcaatggtataataatttgaaaggttttttcaattaaatacatggaaaaaggagtcagtacaatgacagttaatatttatgatgatgccaaccaaatggcaacgcacttgcaagaattaccacaatttttaggcttacaaaatgcctttgcagcattgaaaaaagacgatattgccttcacaatgtttaagaaattccaaacgcaacaaatgacacttcaacaaaaacaaatgcaaggtcaagaattaacggacgacgaaattaaagaaatccaagaacttgctcaaaaaattggggacatcgacgcaatcaagaacttgatggaacaagaacgtcaattaagccaaacaatggatgaattaaaccaaatcatctcaaaaccaatcgcagatatctaccaagcatagaatgcgtttgaaacgggtttggctttgaggattaacctaaaaatgagactgatggcgtattttgtcatcagtcttattttgtagttaactggaaaagtcagtttcaaaaagcacgtttcaaataagagtgtgactgattgcggtcagcaactgagcattaatacaaaaatcgcgttaatccaggttctaggattaacgcgatttttaaattaagcggaagttgttgcaaccagaagcacgtttcaaacggtgaatcgattgatttcgattcaccgcttttttattgcctaaaaacagaacgtttgttctgatcgcctttatcacaccgcgtggcaatggtataatgaagcttatctaagctggttacgaccggccaaaagaatggggtttttcaagatgaaatttatccatgcagctgacgcccatatcgacagtccgtttgtcggattaaaacaagcaccgacagcattgtgggaaacaatccatgcgtcaactttcacggcgtttaaaaaattaattcagacagccatcgatgaagccgtcgattttgtattattagttggtgattcatttgatcaagaagcgcagagtttgccagttcagaaatttttaaaacaacaatttgaacgtttggcagatgtcgacattccggtctatctgagttacgggaatcatgattactgggatgccaatcaagtgcattttgaattgcccgccaatgtccatgtttttggagcacaagtagagtcgtttgaactgactaccaaaggacatgagagtgtgaccattgtagggttcagttatgatcaacggtggttgtcagctgatcgagtggttgattttccacaacgtgccagcacaacttacacgattgggacgttgcacggtagtcaaaaagcaacggccgatacagatcactacgcaccatttacgattagtgaattgaacgcttgccattacgattattgggcattaggtcacattcataagcgccagattctccaagaacgaccagcgattgtttacccggggaacttacaagggcggcataagaatgaacctggtgaaaaaggcttttatttagtggacaccaaagatggtcagttcgatttaacgttcaaaccaacgacggtcattgagtggcaacgtcaacagtttgaggtgacacctgacatgagcttaactcaattgcaaacggctttgagtgcccaattgatgcaaagtgatcacgctagtttagtggcgctagagctaacacacgcggagcgattatcgagtgacttattgcaacggattaataatggtgaattattggcagtcttacaagaccaattggaaaatagtgaaccactgtattggccatacgcgttgaagttgcggtttgcagcacaacagcaatttagtcagattgaccaagcctactgggaccaagcggctgcagctatcttgacaccggacaatattctggaaaaagcaaagccgttaatgaaggaaaactttatccgggaagcaattgaaacaccagaatttcaagcggatctcaaggacttagtcacgacaattctacaagagaagaagatgggggattagccatgcgaattaagacagtcaccattttgggcttcggtaagtggcatgatcagacgattgatttgaataccgactatcaagtcctttatggtcaaaacgaggcggggaagacaacccttacagcctttattaaaggcgtgttattcggctttgcgaccgctaaacaacggtatgaacaatatgtgcccaaaaacggcgcgcaatacggtggtgaattactggttagctatcatgatcgcgatattgtgattcggcggctttccggtaagtttgggggcgacgtaacggtcatcgatcaaggccaagaatttggcgctgattacttagctgacctcttggcaccagcggatgaagctttgtttacgcagatttttgaaacgaaccaacaggatttaaatcagatatttaatctaaaacaggctgattttttgcagcatttattgacgattggtgcggtggggagtcatgagtggctcgattttgccaaggaactggataaggacagtcagaaaattttcaaaccctctgggcgtaagtggccattgaatgttgctttgaagaattatccagagttagtgcaatccgttaacgaagctagtcgtggttatcaagaatatgaaacgaacgcacgtctattgcagagtaccgttgcgacgatgacggaacaccaaaagcaagtggctgaattaaaacaacgccaagcgcagttgcaacatttgcttgatcgttggccaagttatgcggaatggcaagcacttcaaactaaacttgaaaaggcaacgccgtttgacttaacgattgacgaacaataccaagcattagtggtcgaacgagaacgcaatgcaaaggcgttagcagaagcaaaatccgaggtagcaactgttcaagaaacattggatcaaacaggtgaatttcgattttatcaagctaatcaagagacgttggtgccattgtttgaacaattaaatgaacagcaaaaacaaattcaattacttggattacggcaaaaccaaagcgcacaactcgctagcgaaaaagcccaattagcagcgcagtatcaatggcaaacggatcaactaccaaatccgttgacagatgagcaacgcgcacaactagaacaagccgaagctgaaatgaatggggcaaccacgaccagtcaagtgctgaccaagcaactggctgatttagaggcgcaattagccacgcaaaacgcggcagttagtcaggttgaaccacaagaaacgccaacgactgatggacgtgccagtcaattgagtatgctgattggcgtagtcatattcatgattggtcttttcttgccgggcgctctgaaagtcattgcggtcgttggactagccgcacttggctatggtggttacatgatgtggcaaaataaacaatctgaccatgaccaaccagtgcaaaaacaagcttggcaacaagcgctcgctaagttggatgtgttgcaggctgaaaagcaaaccaagacagctgccttacaagcacaacaagcaatattgcagacgatgcacgaacaaagcgcggtattattggcgcaaactggctacgaaacggcgatgccaatcagtcaagttttagcgatgcagcatgctttaagccggatgactcaattgaccatggcgctcaaacaacaacaagccgaaaatcaagcaatcgaagcggcactaaatatgtattgggatgcgtttgcttttgcccgtgattgggtgggggcgttacagggcagtcatgaagagaacttgtcccaggtgagccaattcaaagcccggattacccaactcacacaagaccttgcacaaagcaacgagagttaccggtattatcaacaacaagtgacacgcttaacagacacgattaaagaacaagacgctgcacaaacagcattgttagcaaaggctaacttaacaaccgccgcagaattagccagttgtgttgctaatgaacaacagcgccgtgctaatgaacaacgtcaagctgatttaaaacgcgaattggcaacggacttgtcggctttacaagcaatcgctagtcaagaacagcttaagcaacaagccgctcaaattacagaacaagtggcaagtttgacaagtcagttacaagaacagcaacaagctgttgcgcaactacgcgtgacgcaagcgcaacttgtcgataatgacagttatcaacaacagcgacagcgacaattacaagaacaggctaagattactgatttagcccaagagtggcttgctaagcagttagcaattgattggattcaagcgacgctgaaggccgcttcacaagaacggttcccccgtttattggaaaaggcaacgcagtattttgcaattctaacccagaatcggtatattaagattaacttcgatgacccactgatgacggttttacgggcggatcaagtgctttttgaagtcggtgaattatcacaggggactgcagagcagttatacattgcgctacgctttgcgtttgcagaagaggtagctgacgtagtctcattacctttattggtggatgatggattcgtcaactttgatgatcaacgccaaatcgccgtttggacattactccaacgactcagtgcggccaaccaagtgatttatttaacggccaatccgcggacgcaagcacactttgaagcggatcattggttaaatctagaggaagtggggctgacacatgacagcaaagaaattatttgattaccaaaacgacgagaatctggatttatttgtactaattaaaacggcagacgtgcggattgctaaaaacggcaagcaattcatcgcgtttacgttccaagatcaatcgggacaaatcggcggtaaatactgggatgcttctgatgaagacgttgctaaatttacggcgggtcaggtgatccatttacaaggtaagcgggaattataccaaaataatccgcaagttaagatttataaactgcgcttaacgacgggggacgaaccgcaaacagttgaccagtttattcctaaagcaccggtgcaagtaaccgagatgcaagacgaatttggcgcgatgttattcgaaattacaaacccaaattggcaacgtttggttcgacatttaatgcaaaaacatcaagcggaattcttcagttttccagcggctaagaccaaccaccacgcgtttagtggcggcttggcctatcatacactttcaatgttgcgcttagctaagacgattgctgcccaatatccacaaattgatgaggcattgctatatgctggtgttatcttgcatgatttaggtaaaacgctagaattgtccggtcctatttcaacggaatacacggttcgtggcaatttgatcggtcatattgtactggttgatgaagagatagtgcgggcttgtgatacattaaagatcgacgtgaatgctgaggatatgttgctattgcggcatgttatcttggcccatcatggtttaatggaatatggttcacctgtccggccacaagttcttgaagcagaagttctgcatcaaattgatgaattagatgcaagtatcacgatgatgacccagtcattacaacatgcggaagcaggtcagtttactgaacggctcttcgcaatggatgggcggcgtttctatcgcccagtcgaagatcctaatttagatcaaccaacagaataaatgtacaaaaagaaccccgctgcgacagcagcggggttctttttgttaatgcttatttagatgatgattttgaagctttgctgttaacgccgtagcttgaaaggatgtctgataaatctttgtccttgatagatacgttagcgttcttaagtaccttagtgatgactttgttcatcactgtttggtctttaagccatgaagcgtaaacgatgtctgttaattctttcttgtgatcagccatcttacctttaccagggttcttgatcatccggataacgtggtaaccataagttgtcttaacaggggttgttgtatattcgtttgtctttaatttgaaagcagcagtcttgaatgttgagtcaagtgatgtatcagtactatcgaagacaggtaatttaccgccatctttcttcgtaccagtatcagttgaatatttcttagctaattcgttgaagttctttgttgagttgtcttttgcaagtgcatcaatgacttcttgagctgtttctttcttttcaactaagatatgttgaacttggacttttggttcgtatgatttccattgtttcttcaagtcagcattggttacttttttgttatcttttagtgctgcttgtgttaagtattgtgttttgatgctgttcttaaatgatgtaggtgtcatactgctttgtgcaagcacagagttgaatgatgaaccgtattgttttttgtaaccatcataagttttcttaacttttttatcgatggcttttgagccgtattggttttcaagcgctttttgcaagatcatttgttgcaattgttgcttgccggcagatgtttccttgatttctttatagtattcgtcttgagtgattttaccaccctttaggcttgcgatagtcttgctaccacaacctgctagtgaaactaccattaataaactggcagcggctaatagccatttcttcattgtatgacacatccttatcaaagtatttatgaataaattcgtagtgaattcaccaattaatataacacataaactaactaaattgaacgaagcgtctaaaacttcacagaactttcaaatttaggttttacgctaaaaacgcgggaatcgttgatatgcttaaccttatcgcttgcatacaatctaatttttggtgaatttatttttttaagttttgtgtcaaacgatcaactgattcttcgatttgagcaattcgtggtgctgcttcaaatgaaaatgtttgcaatgcatcactgataccaccaagtgatgtaactgcagttgttttgagttcgtttgataaattttgcgaagctgtttgcaattgaacagcactttgttgaacatcagttgaactttctgagagctcgtttaaatagcgggcaatcgcttgttgtcgtttggggccggttgtagaagcggtgagaagggcataagccgtccctaataagccaccaactagtaatccttttgaaaatgacatgattagtcctccaattgtgcgtgaataccatctgcgatcgcttgtagttggtcagcagtgtaatcagcgctattatcaccgaattgcattgcaaatgaatcatccgctgtgtaacgtggaataagatgaatatgagaatgaaaaacggattgataagccaccgcaccgttattattgcagatgttcattccttggatggctggattgctagctttaatagccttagcaatctttggaatgcgactgaaaacggccgcagctaaatcagcatcgtattcaaagatgtccgccacgtgttttttgggtaccaacaaggtatggccgggtgtcacttgtgtgatgtccaagaaggctttgacatcgtcgtcttcatagaccactgtgttcggaatttcatttcgaacgattttgcaaaagatacaatcatccattaattatgcctactttctcttatttgaagtctcaatacagcttaatgctatcataaacaagggcttttcgctactgccatcagctttgtaagcggatggaaaaatattgagtgggggcatacactcgcagtttacttcgtgttaagatatgatatgaaaaaggattcactaaaaaagtagttttaaaaaccaaaaaacgaggctattgattatgagtttagagattaaccaattaacggggggctacgcgcacgtccccgttttaaaagaggtcagctttactgtgccaaacaatcaagtggttggtttaatcggtttaaatggggccggcaaatcaacaactattaaacacatcattggattattgacaccacaaaaaggcacaattactttagacggtgtgacgttacagtcgaatcctgaccaataccgccaaaaagtagcctatgtaccagaaacgcctgtcttataccctgaattgactttaaaggagcatttagaattaacaatgatggcttatgatttaaacgttgaagagacgtgggttaaagccaatgcattgttaaaacgattccgattagacaataagttagactggttcccggttcacttttcaaaagggatgcggcaaaaagtaatgatcgtcaatgcatttatgacgaatgctgacttgtttatcatcgatgaaccttttactggattggatccattggcaattcatgatttattagaaatcattgctgaaaaaaaagcacaaggagctgcaattctaatgtcgacccatattctcgcaacggcgcaacaatatgctgattcatttgtgcttttaaatcagggtcgcgtacgaacgactggcacgcttgaagaattaaagattgaatttaacatggctgacgccgatctcgacgatatttatctgcagatgacgaaagaaggttaaccatgcaagcattatggcaaaaacgcgtgcaaaaacatattcaagaacaagtgaagtatttgcgcctcgttttcaatgatcatttcgtgattgcgattatctttttattaggagcgttgggctacacatatgctaacgccgtcaaaggactggatccacaagcttggtggctaaaacctgtattgagtttagtattacttgcggcagttagttttggccgcttagcaacattattaaaagaagcggatagtgtcttcttattgccaaaagaaagtggccttgtgacgtatttgaaatcagcacgtttatatagtagctggttaccattaattgcaatggcttttgtgacgcttctagtggcgccactcttgttaattactaagacggtcccggcatggcacatagccgttgtcttgattacattggtaatcatcaaagaccgccgcttttcaatccagttgcgtcagtggtaccaagcggatgaaacccaggcaacaaaagggctttcgttaatccttgatttggcaataattgccagtcaattatatcagtggctaaatttagtcggagtgcttgtagcgcttggactagcctattatcagcgacaacaattggcgcgtgttcaaaagacacagctattcgattggttagcggcagttggtgcagaagattctcgaatgggacgaatttaccgcctctataacctcttcacggatgtgccagggctcagtagtcaggttaagcgtcgtcgctatttagatggcttattaaagccaattacagctaaaccagccaatacttacctctatttatatgcgcgtggctttttgcggggcacagaattcagcgggttatatatccggttagttgttttagggggcatcattctgtgcttcagtcacatatggtggttgagtttggcactcggacttctattgatttatctagttggttttcaattattaccgttttacaatcagtatgatcaaattattttcactcatctatacccagtatcaacgaccaaacgaattcaagcattcagccaattaatgcggactttattattgcttcaggcgttactctttagtgtcattttattagtgacactagggatgacgattcaagttggtttaagtgttttagcattgttcgtgctcgtgattggctttgttcaattctatttgcctaaacggttgggggcatagtccctgtgacacgcatgctttcctacttgacgactactggctaattattatatgatacccttagttattagacagttgaagcaacgtgagcgctgtattttggcgctttattttattgaagaggagtcgaggctgatgaattttgacctggatactggctggcaagttcgtccggccggtggtgatacgggcgctgcatttttaggcgttcgcgcgtcagaaaagattttcctaaagcgcaacacatcaccatttttagcggcgctctcggcagaaggcataacaccacgcttaatctggacgaagcggatttcgagtggggatgtcttaaccgcacaagagtggctcaacggccgaaccttgaaacgtgatgagatgaatagcccacaagtcgctaagttattagcacgggtgcatcaatcccaactattgaaacgaatgttacaaaaagttggcggtcgtgtctggtcagcaaacgaaatgttgcaagcctatttttacgacttaccgcaagatttacggcaacacccatttttagaacaaacagctgattatttgaagcaaacgttacgtcaattacaagcaccttctgcagaggtgtgccatggcgatttaagccataagaattggttgttatcggatattaatcgactctacttagtggattgggactcggcaatgttagccgaccctgcagtcgatttcggaatgattttatttcaatatgttccacgtcaagaatggcacgagtggcttgagaactacggcctagaggtgacgcctgaattaatgatgcgcgtcaactggtacggcagtttgaacctactccaaagtattaagcaccattatcaacgtggtcgttttactgaaatgaaccgtgacatattgcgcttagaagcagtgatttctgaaataattaataaaaattaaatgccaaaggttgggcaagtgtccaacctttttgattggcatcaacaaggagaacataatgcgtttaagaaataaaccttgggcggcggacttaattgcggccaaccccagcatgattttagtgagtccggaagatatcgccggcaagtggcaaacacgttttgccaaagaacaacccatttacatcgaagtgggttcaggtaagggccaatttatcactcagatggcacaaaaatatccagaccggaactttatcgcagttgaaatccaagaatcagcgattgccgtcattttacaaaaacaagttgaattgaaattgccaaatctccaattattattgggtaacggcgcagccttaacaactttctttgctgaaaacgaagtggcaggggtgtacttaaacttctctgatccatggcctaagacgcgccatgaaaagcgccgattgacatataagtcattcttagcggaataccaacaaattatgcaaccaacgggctacttacgtttcaagactgataaccaaggtctattcgaatactcattgatgagcctgaatgattatgggatggtttttgacgacatctcactcgatttacacaatagtgaacttgcagaagacaacatccaaacggaatacgaagaaaaattcagcaagcgcggccaagtgatttacagattagaggcacactacaagtagagtgctttcaaagctggtcagcacccgagcaatagcctagtctggtgaataaccaatgcaattggttgtttgccggacgtagctatgcacagggtgctagctttgaaagcacgttttagataagagtgcacttgacgctcggtcagattttgagcactaacataggctggcgaatgagtgatataatcgctaatttgacaggtgtagttaggcgcagaaatctagcgtcaatagcacgtttcagcaagagtgtttttatcgcacgggttgcctttgaggattagcctaagaaagggattgatgggggttctttaccatcgattcctttctgtagctaaccggagaagacagtgtgataaagcacgtttcaactcaaaaaggtacgttatccagattttatctaggatagcgtacctttttaattataatattggttgaaacgtgctccgcgcggtatgttcctgcggttagcaacgtcagtcaagcgaccaataaattggtcactcgtctgactaagctaatcctcagaacgtgcccaccgcgctgtgcactctaaatttgtgagaattcaatcacgacgccggttcttgcgtctaccttgaatcgaaattggtttgtaccatcttcacgctcgcagatgatgccaccttgatagactggaaaggtccgtttgttttgtgagaataagtggggactttcttcaatccaagaacccacaatctggccttcatggtttaagccggctttaacatcttctaaaatttggtttaatttaatcattctttgttgcgcccgatattgcttcgcactggcagccgccgccagcgcaaaaccgatgccggttaataaatatttaaacgtttgcccattttttttcaaagaaaaactcctcagtcgtttttgtctttaaatagtatagcataatttttggtcctaaggagtggacatttacggacaaaccgcttatattaaaacgagtagtaaaattgaaggggtgcataatgaaagaattagcagcgatgacagatacgaatctgactcatctgattactgaagggaaacatgttttattttttacagcaacttggtgtagtgattgtcggtttattaaaccagccatgccagaaattgaagctgaattcccggaatacgactttattgaaatcgatcgggaccaatttatcgatatttgtgaagaatgggaaatctttgggattcctagctttgttgtgattgataacggtaaagaaatcggccgttttgtcaataaagatcggaaaacaaaacgcgaaattactggatttattcactcattgaactaaccttgaaggagtcattaaatgttaattgcaagtatgaaccaagcggcttttcccaacatcttagtggtaatgacccaacctgatgttgaaaagcaagtgacaactgaaaaacaatcaatcgtacggattagtgatcaggcaggtcaaaccatcggctataatttcttagcggtgaatgagttattgcccgatttacaattcaacggtgttcaaacactaactgaacagcaagttgctgttttaaatgaagcacttgtagcagctggtttcaccggtgatttagtggctgatgaaacaccacacattgtcgttggttatgtccaagaatgtgatgtgcatcctgattcagaccatatgcacgttactcaaacacagattgcacctgatcaaaccgttcaaatcgtttgtggtgctgccaatatcgcacaaggacaaaaagtaattgtggcaacagtgggtgctgtcatgccagaaggtaaaattatctggcctggtcaactccgcggtgttcaaagtgacggcatgatctgtgcagcccgtgaaatcggtgttgctggtgctcctgctaaagggattatggtcttaccagatgattgggaagtcggccgtgaagtgacagcagatgcagtcgcagccttactaaaataatccatcttacgattttgttatgggattattaaaattaaaatagtatgataatagatagcaattaattggttaaagacaaaccctttaattgttatttcattttgcagtcaattaagcagtaaaacacaaaagaggggttaaacatatgtgtgggattgtcggatttgctggtggattatttgatttaccaaagaaaaaagaagtattgaaccaacaaatggacgtcattaaacaccgtggaccaagtggtgatggtgattttatcgatgataaagtcgcattaggctttcggcgtttatcaatcattgatttagcaaagggtgatcaacccatttataatgaagaccacactaagctagtctttttcaatggtgaaatttataattatcgtgaaatgcggactgaattgatcgcacttggtcacgactttaaaacagattcagatactgaaaccattttgcatgcttacgaagaatggggtaaagaggttgttacaaaattgcgtgggatgtttgtctttgtcatctatgacttacaaactaagcaattatttggtgctcgtgatttcttcggcattaagcccctttattacacgactttagcagatgggactttcatgttcagtagtgaaattaaaactttcatgcgccatccagaatttaaaccagaactaaataagacagccttaaaatcattcatgatgaatcaatacaatgatttacaagaaacgttcttcaagggtgttttcagattcccagcaggccattatttcacttatcaagatggccaattggacatcgaaaaatattgggatatgtcatttaatccttcaaacttatctttcgaagaagaagtggctaagattgatgctgcagtcgaagaatccgttaaagcccataatgtggctgacgtaccagttggagctttcttatcagaaggggtcgacagtagttatgtcacaagtattttgcaaccgcaagaagtcttcagtgttgggtttgatgatcaaacctataatgaagtcacagcagcccgggcgcttgccgatgaattaggcttgaacttcaatgaaaccaaagtgaatgccgatgatgcgtttgctgaatttgacaaaatccaatattacttggacgaaccagatgggaacccatcatgtgtgccattatggttcttgtcacgctttgcccgtgaaaaagtaacggttgccttgtctggtgaaggggccgacgaattattcgctggctatgtcaactacggcatgcattcccacaattcaacaattaaggccttcacttctggcttgaagaaattacctaagggtgcgcgtgccagtttagccaaagccgttaagaagatgccagccttcccaggtcgcgtccatttatacacgaatttggcgaacccgcgtgaattctatacgggtcaatctgtgatttttgatatcgaaaatccaagtatttttggggcagatgaagccaatactttcttgaaacctgcttatcaaaatgatggaacgattcaagcaaactatcaagctgattttgataacgttgcggatgctgatccagtctcacaaatgcaatatatcgacttacatcacttcatgttaaacgatattttgcaaaaggctgataagatttcaatggcgcacagcttagaattacgcgtgccgttcctggatcctaaggtggctaaggccgctggtgaagtcccaactaaatacttaattaatagtcatgatacgaaatacgcttatcgtcaagcttctgctaaacatttgccaacagcttgggccaaccgtcctaagttaggtttcccagtgccaattaagcaatggttagaagatgacaagtattatgaaaaagtcaaagcactctttagcgaagatttcgttgcagaattctttgatcaagataagttattggccttgttagatgccaataaagaacaacgcattaacggccgtcggaagatctggaccatctttaccttcttaacatggtataaagtctacttccaaaatgtcgaagattatttagcattaggctagagtgtgacctatagaatccgtttaagtgcagccacaaaattaatttttgtggctgctttttttgcgttttagagatcaatcaattgataacagagaaaaataaacattcattatttagctcaaacccgcattatggtaaactataagggattagtttaatcatatagataattgtgatttattgaaaagaggacgtttaaaagatgataacaaatgacacagtttaccattttgttgggattaaaggttcaggaatgagtgctcttgcacttgttttaaacgacctaggctatcaagtacaaggctcagatatcgatcaatatacgtttacacaacgcgatttagaacgagcaggaatcaaaattctgccattctcagaaactaatttacacgaaggcttaacggtgattgccgggaatgctttccaagatgaccaaattgaaattaaaacggcccttgaaatgggcttgccagtcgttcgttatcaccaattcttaggtgaattattgaaaggctatacaagtatcggcgtggccggtgcgcatggtaaaacaagtacgagtggcttattagctcacgttttaagtggtgtggctaagacgagttacttagtcggtgacgggacaggtaaagggattaaagatgcgcaattcttcgcatttgaagcggatgaatatcgccgtcatttcctagcttattcaccagattatttaatcatgacgaatatcgactttgatcaccctgattattacacaggcttagatgatgtgtttgacgcgttccaatcagaagcttacaaagttcaaaaagggatttttgcttggggtgatgatcctgaattacggaaaatcaaagctaatgtgcccgtttattattatgggacacgcgaagacgatgacttccaagcccgcaacatccaacggacggtgcaaggttcagaattcgatgcttactatcatggcgaaaacatcggccattaccacgtcccactttacggtgaacacaatgtcttaaacagtttagccgtaattgctgtcagtcatttagaaaaaattgatggcaaagaagtggcacgcgaattggcagacttcaagggtgttaaacgccgctttacagaaaagaaagttgctgacgtgacaatcattgatgattatgcgcaccatccatcagaaattaaagccacattggatgcagcacggcaaaaatatccagacaaacaaattgtagcggttttccaaccccatacgttcacacggacaattgcgttaatggatgattttgccgctagcttaaaccttgcggatgaagtcttcttaacggatatctttagttcagtgcgtgaaaaagcagggaaggtttcaagtgctgacttaggtgcgaaaatcactaaaggtggccgcgtcttgaaattagacaatatgtcaccgctcttagacttcgaccaaccagtcgttgtcttcatgggcgctggtgatgtgcaaaaatacgaatatgcttacgaagaattattgagtaatttaagtcctaaagataattaagatttaggcattttgattgtctttctggatggatttgttacaatattcctaatcgggtgattatgggcccgtttagaaatataagaggtgaatattcatggaagaaagacgcgttgtgaatgtcgacagcgaagcccgctttttcagtaaagtgtatggtttgatggctgtcggtgtcggaatttcagcactgattgctgttttaatggtgactgtgtttaaagcacaaacttacacaatcctatcaagtggtagctcgtggatggtttggggcttgatgattgcagaattaattttagtcgttcagattagtcggcgttcaatgaagaatccaacggcctcgttagccatgtttgtggcatatgcggcgttgaacggattgacgtttacggccgttttactggtgtataacattggtgaaattggggcagctttcgcatcaagtgctttagtgttcattgccatgtcgatttatggtcgcatgacaaagaataacttaagcggctttggcaagtttgcaatgatggggttaatcggtgtgattattgtctcattggttaacttcttcatggcatcagctgcaattagctacttcttgtcatacgctatgttaattatttttatcattttaacagcatgggacaatcaaaagttaagtatgatgtaccgtcaatacggcgcaactggtgaaatttcggtttctggtttagctgttataggcgcattaaccttgtacttagactttgttaacttattcctcacaatgctccaaatttttggcggcggcagagattaagggtttgataacagtcgggatatgactgttatcaaacgtttcaaaagaacggtcatcaggtaaaactgatgggcgttctttttttatgcttgacacaatactatgcataatatagtattaactttcgaaagggtgatcggtttgaatccacaattaaagaaaggcctcttggaattttgtgtgttagcaacgcttaagaaagaggattcatatggctaccaaattatcaaagatacatcgagtgtcgttgaaatttcggactcaacattatacccaatcttgaaacggctcgaggcgcagggtgaaattgaaagttatcgggtcgaacataatggacgcttgcgtaaatatttccatttaacattggcgggacaagcatcgattgatagttttttggccgattggccggcagtgatgggcatttatacttacataagggagtgtaacaatgactaagaatcaatttattaaacagcttgcggcagaattaacgcggtatgggattagtgatgcagccaacacgattgattattacgatgaattaatcgatgatcgactggaagcgggtgaaacggaagcggagattatcgcgagtttagcaacgccagctcagattgtagcgcaattagctacaccagataaaccggttcgccaaaagaagatggcaccgatgttgattattttaatcagtatcttgttagttttagggtcaccgttatggggcacgttgttattgaccgccatcatattagtggcacttggttatttcttgatttggttaggcccgtttctgggggcaatctttgctgctgccggcattcttggtgggagtgtcagcttagttttatcgttctttgttggcttacaagaaggctggataattgcggtgatgcagcttggaattagttttgtgatggttggtgtggggctgatttgtgcaggggcgacctggtacatgacgaaatacttaattcgtttctcggttggaatcacacgctggctagttgggatgttccgtagtcgattaaaggtggtggcgtagatgttgaaaaattggttgaagattagtttatgtatgattcttgtgggaattattttaatgaccgttagttttgggatggcgggttttaaaagccaaccattccaatatcgtggcacacatgaatggagccggacgtttaacttttaagataaataaaaagaggtgcctgaagtgaaccccaaatattggacgaaactttaagcagctttctgggttgtaaaaattcgatattcaatcggacttttacaacccaacgggtgataggacatctagtccttttgggccaaaggccttataacgttgaacccacgagacaactagtgagttactcttaataccatattttctcgctattaattcataacctaaggatgacgttagataatcctgaacaacttttatttttaatgttttagaatatttggtcaatataaaaacccccgatattggattttggtccaatatcgggggttcacttcagccgatgatgataatcgacacctcttttgttcgttattgaccgttccatggataatcggtactgatattttgattgaaatgtttttgactttgaaaatttgcgagacggtgggcttttcgttcctcataaccggcacagatgaaccgttcttccggtgattcgggttgaatgttaggaagggccggacctttttccattgtgacaaaggttaagaaggcagttagcccgaggaatcgttcgccggtcttgagatgttcaccgataatcttagtaaagatttcaatggaacgggtgccgacaccggcaacgtaactttcgatgcacaaggaatcttgcattttgaatggttcaatgaagttcagttggtcgatgctggcggtgacggtttcgacgcgcgctaagcggctagctgaaatggacgccgaaccatccaagagttcaagcaagcgtccgccatagaccgtttcatgttcgttcaaatcattgacgaagacgcgatggttactgatggagagggtttgacgacaggtgatgagatttgacattataaaaagactccttattaatcatttagatgggggacaatcagttggctagcagccaagtcgacttggtaaacgaatgcttgctcttcacgaatcgtcattcccatatcagtcgcgtagactaatagaccgagttgatgtcccgctgttaaatcataatgggtgggttgtaggtcgagtgtgatatcatagaattcgtttggggtgacggcgtcggtttgataactattgtggcgattttggagattgatgtgtcctttagtgatgacttgataattgcttggtcgattgagcttaaattcctttaaatcatcatagcgccactgatagccgagttgttggcctttagcagctaatacagcaggtgtggtgcctaaacggttgaattgaccatagtcaataaccagcacgctcaatagcccacgttcggcattgacagcgacccttgttctaaactgaattcggccatcaataatgagcggttcggtaagcgggaagcctaagaaacgcaaccggttgccagtgaaacttgattgatctgcgattaaggcatcttgccaagcggttgtactgattttttgggctctaaaggccgcaacaccgtcatctttaaaagtcgtcagtggggcattttcggtagcattagtgcttaatgtttgttcgtttagccagaaagtcgtagttggattgtcgagggctagccaatccgcctgggtcgtccaagtggcttcttgtgcgttgtcttgaattgtaacagccggtaattttgtgacagcctgattctcaacgccgagtaattgatgcgtgaaccataagttcatcatatcggtgaaatcgatcgactgaatgttattcatatagatatgttcaccttggtgtaagaaaagcttcttattaaccggttgatcgcgcaataaatcccacaaggcgccggcattttgtagtttaacgttccaatcatttaatccgtggactaagatgacatcgcaattcaggttggcgagattgtcacgatagttacgggctgcccagaaggcgttgtaattgcctgtgatgcgatcttgaccttcttgcagggctttgagttggtcggcgaagaaagtgccagagagcgcatgatcagcggcatctttttggcgggtttggcacaacttcgctaagacatcggcatcttcaccctgacaatcaattggggcgaccactaagccattttcgcggtagtaatcgtaccaactggaaatggcggcttcagctacaatggttctcagaccttcaacgccagttgttgcagcagcagtggctaaagtaccaaggtaggatttaccagtcattgcaacttggtgattacaccaccaagctttaatttcaatgccatcggtgcggttggtgaaagctcgtcgattaccggctaaccactcgatgatagccgtggttgaagctgtttcttcaggtgagccacaagtccggacgccgtcggaaccgcgtgtgccaatgccgccagcgtaaacgttcgcaaatccgcgcgccagaaagtaatcatttaaactgtaattgctgtcatctgttgcgtttaattcagttgtcatacttgtgccattaacggcgcgaggttgaggaagcggtgcagtggttggcgtttgggttaaatcagctaagcttggttgttgaacgggtttagtcgcaattgtagtatcaacattgtgcaaatcagcatcgacgtcgttaatccccttatagtaaggactggcagtgtagagtgccggaatttttaagcctgcttcagtttcgcgtggtctgaagatagtcgtttctaataagtcgcgttggccatcttgatcagtatctaggctcgattcaacataaacgacttctcgaattaaatggctggtatcgaaaacgggctggaccttaccattgaagatgagaaattggggctgatcactttgccagtctgcaaaaaaaccacggttagccaattgatccagataaagtaacccagtttggctacgcgtcgttaataggagataaagggcttcgatgaaagtggtctgatcaaatgccgcttgatcgataaatgggagttttgtggcggccataaaagcagtgggttgatcaagttcaaaatcggttgtcatttcaaaacccaagagttggagggcgacattatagaagacaacttgatcgaatgaagtatcaatggtttcaaggtaggcggttagatttaattcggttgtggcttgtaataaactaagttgcccgctctgggttgattgactatgtgcttctgggaacagccgttgaaaaatatcttgggcaaggacttggaaggggagctgggtgaaatcctttgggagtaaatgaatacgctgtaattccgtgatttgttcagattgagatttagttaagcgtgaaaactgatttaattgcatgtttttccctcatttctgcgaattttaattgacagtgactacttcaattgcttataatatagcatgttgtgtggtattctgacagcaaaaaccgtcaatcaatgaggtcatagtagctcagctggatagagcaacggtcttctaaaccgtaggtcgcgagttcgaatctcgcctgtgacattcaataattcttggagacatctaatttcgcacattgcttgcgaggttaggtgtttttttaatgatggagtgaatgtaaaatgcaagattatttaaaagcgcatcaaacatggttagttgatttttatcaacaacggaattggtatcgattttcaccattaattcggttgaacttcttgagtgaagaacttggggaattgtcacgggccgttagaacgattgaacttgggcgtgatcacccagggaaaaaagttaaaaacgacgttgaaaagcaagctaacttaaaagaggagttagccgattgcttcgaccaactgctcattatctgttcgaaatatgaaattgagcctgaggaattgatggcacttagcgaggcaaagtttacaaaacggttcgaaaatgattagaaattaaatatttaaataaaaagtttatgcgctttaaagcctattttaatagccttttgcgaatgaattgcgagcgatttagtcgatagttttgggatgcgggttgctaattagaaaatgccatgctatactgttcaagtaatcaaattttgaaacgtaatttgagttttggatgcacaataccttcctcttttacctatcaataatttattgcaacaaaaaacgtacattgatatgtatcaggaggaaattattatgaacaacggcacagtaaaatggtttaacgcagacaaaggttttggttttatcactggtgaagacggcaaagacgtatttgctcacttctcagctatccaaggtgacggttacaagtcattagacgaaggccaagcagtatcatttgatgttgaagacagcgaccgcggtcctcaagcaacaaacatcgttaaactttaatatttgtgccccgcatccgcggggtttttttatacaatcaaataagtaaggacctgagacaaaaactgtctcaggtccttttttagtttagtggaaaataatattctcatgttgccactaatgataagcgattttatagtctcaattactctgttaaatactgtaacaaatgcttttcggcattatcatagttgtattgccgagcattgagtaacaccaagttgcgatcattatcaaaaaaattaccggtgctctgcgttagatcgggatggagtgctaagtattttccaactggcacttcagtatgcagcaatgtttgggaataatgcggtagctcatcggtgacattccctgggaaaaatgaattgaccgtaatctctttttcagccagaaaataactgagaaagagggttaataaagctttatgggttaataaccaccttgcacgttgtaaagtagtctcctgttcttcgcaaatgctgagttgttgaatgatttgcggatcaccggttatgataaggacgcgaccgccagttaatcggtctgctaagcccattgttagctgataatgggggactaaattagccttaatattttcttctgctgagctggggaaaacaccggcagtgtgcactagaacgtgtattttatccactttatatttgatgcttgccagtgcttggttgcgtcctgatttggtcgctaaatcggcttggataaaaaaggccgcttttccaagttgggccacagaagcccggccttttgccgcatcctgtccaacgataatgacttgatggccttctgcaatgagatctttggcaatgcgatagccaatcccagatgttccaccggttattacaatatccatatgtgacagtcctttctttttcaaattattatttaagttgattgatttagaaatgagtgcatgagatagctattaagtgctttcgttaattaacttagggtcagtatatattaggctttttagagataccaattctttaactcgaattcgtgcaccatcgacggtactatagctattaacgatatgtcttttgtttaggcagttaaattgtcaaggtcctattgggttcagtatgatgaacatatagttaggattcgcattcatttcattaataggagggtgttgctaaatgattacaacgtataagaaaattttagtcggggtcgatggatctgacttagcgaacaaggcatttatggaagctgttgaagttgcgaaaagaaatgatgctgagctttatgtggctcatattattccaagtacagtctatgtttcaccggatgctagtgtctatgcgaagatgacggcgatggaaaaagatcgtgtgaaggagcaactagcggctaatattcgttacgcgaataatcatgggctaacgaaggtcaccccgattctggaagtcggctcaccgaaaaaagaaattgcgattcgcattcctgaagaatatgggattgatttaatcatgttggggattacggggaaaggggttattgaacgaatgatgatgggatcggttgcccaatatgttagtgcccatgctgcaacgaatgttttattagttaaataagaacgtctggttccaaaaaagcggtcacgacattttttgtcgcgaccgcttttttgcgtgtggttagatgacaataatgtcactgttcaaatccaaaagcgtattgtacattaatattgtaataaattaatggatagattagaaatttcggagggacagttgatgtcaaaaaaagggcgtcaaattggtggtgtcattggtattctggtcatattcggtctggtagcgggcggaattgtggttcagcgacaacatcaccaacgagaagtaaaaatcgcgcaacaacaagccaagattaagcgccaacgacaagcgcaagaagcaaagaaacagcgcgaatcacaaaaagtcgctgctgctaaagcaaaggaagaacgacttaaagcagaaagccaaccgacaattgttgcagaacaagcgttagatgactacttaaagcaaattggcttttcaggtaccgcgttaattgtccgcgataagcaagttttgttggataaggggtacggcagtgctaatcgggccaagcagttggtgaatacgccagatacgctatatgcgattggttcaactgaaaaagcgttgattgcaacgagtttattgcagttacaagaacaaggaaagctaaacgtcaacgatccaatcagtcggtacctcccggactttccgaatgggcagcagattaaactgactgattttttacatcatacatcaggcattgtcggtcgggaccaagataatcagacgaagactctcgaccaattaatcgaagaaattattaaaaatgggattaaggaacaaccgggcaagtggcactatatggatgcgaactatattgtgctgacgaaggttttggaaaaagtgagtcatcaagattacaaaacgtatctaaaagaaaaaattctaaaaccaagtaaaatggcgcacactggtttcatgacggatcaatattcgcgattaccagcggcttccattggctatctggcaaatggcgctgcgggacaactccccaatttcacgcaactaccaggggtcggagatatgtatatgacggcgactgatatgtaccgttttgaccgcgcgttgtggactggaaaattaattaatgaacagagtaaggctcaaatgttccaaccagggagtacgtcccactatggaatgggcttttacaatgatccagcactcattgttaatcgtggttatttgtcaggctggaatgtgtcgaacggatttagccacggtggccgaatctatatcgtgttattttcaaacgaaaagaacgaaaaggtttcgctcagcaagatgaacggtgaattatatactaaaataactgcaacgatttaagtaaaaaaacgggtttaatgattcagatgaaggactttaattagtgttgatctgagattattgacccgttttttaattttggatgtgctacaaatgtcgaattggtaaggatgttaaattgtgtaaaatttaatttgggtaaaacgctttctttttggacatcggtaatctataatagttttcgaggaaacgttttcctaacattgttgttaaaggaggattaagatgactgaaaaatacattttggcgattgatgagggaacaaccagtactcgttcaatcatttttgatcacaatggtcaaaaagtcgccgatgcacagcgtgaattcccccagtacttccccgaaccgggctgggtagaacataatgcaaacgaaatttggaacgctgttttatcgacgattgcaaacgcttttatatcatcggggattcaaccccatcaaatcgcggggattgggattactaatcaacgtgaaacaactattatttgggataaggaaactggtttaccaatttataatgcggttgtttggcaatcaagacaaacaaatgacattgccgaacaattgaagaaagatgggcatgaagaattattccatcaaaagacggggctattaattgatgcttacttctcagcgactaagattcgttggattttagatcaagtgccaggtgcacaagaacgagccgaaaagggcgaactcctctttggaaccatcgatacttggattacatggaagttaacaggtagcgcttcacacgttaccgactatacaaatgcaagtcggacaatgttgtttaacattcacgatttggattgggacgacgaaatcctcaagattttaaacattccacgggccatgttacctgatgttcggtcaaactctgaaatttatggtgaaacagcaccttatcatttctatggtagcacggtaccaatttcagggatggcaggggatcaacaagccgcattatttggtcaattagctctccaaccagggatggttaagaacacctatggtacaggttcatttattgtgatgaatactggcgaaaaaccaacaatgtcagaaaacaacttgctaacgacaattggttattcaatcaatggtaaagtcaactatgcacttgaaggctcagtcttcgttgctggttcagccattcaatggttgcgtgatagtatgcaactggttgaaaaatcatcagattcagaagcagccgctaaggcttcaaccagtttaaatgaagtttatgttgtgcctgcctttacaggtttgggtgcaccatactgggactcagaagcacgtggttcaattctagggattacgcgtgggacgaaccgacaagacgttattaaggcaacactgcaatcattagcttatcaaactcgggatgtcgttcaaaccatgcaaaaagatactggcattgatatcaaagtgctccgcgttgatggtggtgctgcaaacaacaactatttaatgcaattccaagcagatattttgaatagctcgattgaaaaggcagctaatttagaaacaactgcaatgggggctgcatttttggctggtttagcagttggtttctggcaagatacagacgaattggcgcatattttctcagttgggcaacgtttcgaaccagaaatgcctgaagaagaacgggaagatctctatgctggttggcaacaagcagttgaagcaacaaaggttttcaaacatcgaccatataaaatgcgtgaatgaggaggattataatgacattttcattagaaggacgtcaacaagtaattaataacttaaagaacgaacaacttgatttattagtaatcggtggcgggatcactggtgctggggttgctattcaagcggctgcatcaggcatcaaaaccggtttgattgaaatgcaagattttgctgaagggacttcatcacgttcaacgaagttagttcacggtggtatccgttatttaaagactttcgacgttggggttgttgcagatactgttagtgaacgggccgttgttcaagggattgcacctcacatcccacggcctacaccaatgcttttaccaatctatgatgaacctgaagcaacttacgacatgttcagtgtcaagattgccatggatttatacgataaattggcaggggtaactggtacacaatatgccaactatacaattgatcgtaaagaagtactccaacgcgaacctggcttgaagtcagaccgtttgatgggtgctggtgtttatttagatttcgtcaataatgatgcgcgcttagtcatcgaaaatattaaagaagctgacgaattaggtgcatcaatcgcaagtcacgttaaagcagtcggaatgacttatgatgcaaacggtcgcgtaaacggtttgaaagcacacgatgaattaacggatgaaacattcgatattcatgccaaattagtcattaatactgctggcccttgggtggataaagtaaatgctttaaacacggaagtcaaagcacaagaaacacttcgtcctactaaagggattcatttagttgttgatagtagtcgtttatcagtgccacaaccaacttacttcgattcaggcttacatgatggtcggatgattttcgttgtgccacgcgaaggtaagacgtacttcgggacaactgatactgattacacaggcgatttcaaacacccacgtgttgaacaagcagacgttgattacctcttaaaagcaatcaacaatcgctatcctagcgttaatatcgctttaaacgatattgaagctagctgggcaggtttacgaccattaatttctaataacggtagctccgattataacggtggtggcgctaatagcggtaaggtttcagaagaatcattcaacaacttaatcaagacagttgatgattacgaaaacaaaacagctgctcgtgcagatgttgaaaaagcaatcagtcaattaagaacggcgcatgctgaagaatcagtcaacccatcacaagtttctcgtggtagtgatttgaaagtggctgaaaacggcttaatcactttatcaggtggtaagattactgattatcgtaagatggcagccggtgcgcttgaattaatccgggatatcttgaagaaagatttcaatgaaacagttcgtgaaatcgattctaagaaattacaagtttcaggtgggcacttcgatccaaataacgtggatgatacccttaaattctatgcaaaagttgcgatgaacaaagggattgatgaagaagatgcgattgatttagcaaaccgcttcggttcaaacgtcagccgggttgtttcatacgcggaccaaggtgctgctgaaggcttgaacttgaaagaaacaatcagcttaagatactcagttaacgaagaaatgacattaacaccagttgattatcttttaagacggacaaacttcatcttattccacaatgatcaattagcagccatcaaacaaccagttgttgatgaaatggcgcgtttattgaactgggatgacgctgaaaaagcacgtcaaacagaattattggattcagcaattgttgaagcacaattagactatttaaaataggacttaacttggaggaaatctcatggaacattcaataatggttcaggcgcttggtgaacttgttgggacgtttatccttgttcttttaggggatggcgttgtagcgggcgttagcttagcaaaaacaaaagccaacggtgctggctgggttgctatcacgcttggttggggctttgcggttactttaggggtatatacctctgcatttatgggacctgcacacttgaacccagcggtgacgattgcttttgcaatgattggcaagaccccttgggcagcggtggtaccattcattatcgcccaaatgattggggcgttcttaggcgcagttgtcgtttggattcaatactatccacattggcaagctactaaagatcaagcagcaatcttaggcacttttgcaactggccctgcgattcgcagcccatttgccaatttaatgagtgaattgattgggacattcgtcttaatcttcgctttactagcattaacacgtggtgaattaacagccggtttgaacccattagtggttggggtggttatcacagcaatcggtctatcacttggtgggacgactggttacgcgattaacccggctcgagatttaggcccacggattgcccatgcagtcttgccgattgccaacaagggtgattcagactggtcatacagctggatcccagttgtcggtccaatcatcggtgggattttaggtgcattactcttcgttgtattgccataacgataaaaaaacgattaaccaacaggttaatcgttttttttgtgtatttatgatttaaatacgaattattaaatgtatttatataaaatagttcgtaaaatattttgacatatcagatgaagattgttagaatcaaagcataatcaacaacgagaaagtgggcaaagaatatgagtgatgtggcacttgttatgggctctatatcagattggggaacaatggaacagaccgcttctgtattatcggagttgggcgtgagttatacgaaacagattatttctgctcatcggatgccggatgaaatgttcgccttttcaaaagaagcacaggcgaacgggtatcgtgcgattattgctggtgcgggtggtgccgcacatttgccggggatgattgctgccaatacagtcttaccagtcattggcgtgccaattcaaagtaaggcacttagtgggctggattctttattatcaattgtgcaaatgccaggtggcgtaccagtggcgacggttgcgattggtaaagcgggggccgttaacgctggtattttagcgacacagatttgtggcttgcaggtcccagcttatcaagtggcactgcaacagtatcaagcacggatgcatgcaaaggcggtggcaagtaatgcagactttgactaaccaaattttaccagggcaaacgattgggattgttgggggcggtcagttaggtcagatgatgacattagcggctaaagagatggggtttgcagtgattatcttagatccgcaggcagactgtccagccggacaagtcgcggatgatcaaattgtggcagcttatgatgatcaggcacaaattatgatgttagcgcaacgtgtcgatgtgttgacatatgaatttgaaaacgtcgatgctaagacgattgaagctgcccgagaatatacatggattcctcaagggacgaaggcgctacggattgctcaagaccgattgttggagaaacaatttcttgttgaccaacagctaccacatgccacctttgagattgtaacgacccctgcagaattaataccagctgttaaaaaagttggttttccttgtatcttgaagaccacgcgcggtggatatgatggtaaaggacaagtcattctacggtccgcaatggatatggaggtggctcaacagttgttaaccgctagtgtttgtgtattagaagcgatggtccattttgatcaagaaatttcggtcataattagtcagaattcagccgggcaacaagccgtttttcccgcaatcgagaatcaacaccgagataacattttacatatcagcatctgcccggcgcgcatttcagcggcgttagcggcacaagcggaatcggttgcggcaaaaattgccacgcagattgaattagtcggcacgttaggtgtcgagttttttgtcggccatgacgggcaactctacgttaatgagattgcaccgcggccgcataattcaggtcatctaacgattgaagcgtgtgacttttctcaatttgcaacccacattcggggcgtctgcaactggccactccaaacaccacaattgtggcaatcagcggtaatggtcaatattcttgggcagcactggcaagcagcactaacagccagtcggcagtcagcagattggcattatcacgactatggcaaagtggttcaaaaggtcaaccgcaagatgggccacgtcacgttattaacgccggctgttgatgaaacgttaacggcaattaaaaagactaaaatttgggactagaggggacgctaataaatgattgaacggtatacaaatcctgaaatgggtgcgatttggacggaccagaataaatatgaggcatggctggcagttgaaattttagcggatgaggcttggtcagaactcggacacattccggctgaagatgttgcgaaaattcgtgccaatgcgatgttctcaattccacggatcttagaaatcgaacaggaaacgcggcacgatgttgtcgccttcaccagagcagtttctgaatcacttggagatgaacgcaagtgggtccactatggtttaacatcgaccgatgtggtggatacggcgtatggttatttgttgaaacaagccaacgccattttgcgggccgatatcgatgcgctattggcggtgattgccaaacaagccaaacgttaccaagatacggtcatgatgggccggacgcatggtgttcacgctgaaccaacgacgtttgggttgaagctagcactatggtattcggaattaaaacgacataaggcacgttttgaaaaagctgcaaaaggcgttgaagccggtaaaattagtggggcggtgggcacgtttgccaatattccaccgtttgtcgaagcctatgtgtgcgaacatttaggaattcgcgcccaagaaatctcaacacaagtcttaccacgggacttgcatgctgcctacgtggctgaaatggcgttactagcaacttcaatcgagaagtttgcgactgaaattcggggtctccaaaaatctgaaacccgcgaggtcgaagaatttttcgcgaaaggccaaaaaggctcatcagcaatgccccataaacggaatccgattggttctgaaaatattacgggcttggcacgcgtgattcgcggacacatggtaacggcgtatgaagacgttgcactctggcatgaacgtgatatttcgcatagttctgccgaacgcatcatcttaccggatactacgattttgttggattatatgcttcgacggttcaccaaaattatgacggacttgacagtcttcccagaaaatatgaagcgtaatatggggcggactttcgggttgatttacagccaacgggttcttttgaagttaatcgatcatgggctttcgagagaagcggcttatgacttgattcaacctaaaacggcccaagcttgggatcaacaaactgatttcagaccgttgttagaagcggatgaccggattatgaatgtgttgacgcccgctgatttagacgacgcgtttgattaccattaccatattcgccgcgtcgcagaaatctttgaccgcgttggtttgggcgaataatgatgaaaactttgaaatgaggttatttcaaagtttttttacaccctaatgtaacacgaacgattattttaattttaaataaaatgtatgttatttggagggattcaagcatgagtgagacgttgttttattctggaaaagcgaaagatgtttttacaactgacgatcaaaatgtgttgagaatggtctataaggaccaagcaacggcgttaaatggcaaacgcaaggaacagattacgggaaaaggattattgaattatcagatttcgaaattaattttcaaatacttgatggcaaatggtattgaaacgcatttaatcgagaatatttcagcaactgaacagctcgtcaagaaagtgacgattgtgcccctagaagtagtattgcgcaacgtggtggcagggagttttgcccgcaagtttggtcaagcaccgggcaaacgattggccacgccgattatcgaatactattacaaaaatgatgcactagatgatccagccatcaatatttcgcaagccaccgcgcttggaattgtgacaccggcggaaattgaagtgattgaaaaacaaactaagcagatcaaccagctgctaatcgatttattcgaccgtgcggatatcgatttaatcgactttaagttggaatttggccggtatgacggtcgcttgattttggcggatgaattttccccagataactgccgtctgtgggatcaaacgacgcatgaatcgctagataaggatgttttccgcttgaacaaaggggatttagtatcggtgtacgatgtcgtattacgacgattagaaaaaattttagggggttctacagatgtttaatgtgcgtgtgcaagtgacttataaagattcggtgctagatccacaaggccaggctgtccaaaaagctatcgaacgacttggctttgatggtgtgagcggcatgcgcattggcaagtcctttgaaatgcaagtggctggcgatgaccaagccgcagttgaaaaaaaggtcgtacaaatctgtgatcaactcttagccaatcctaatatggaacaataccactacgacatacaaaaggtggcgacgaatcaatgaaatttgccgtattagttttcccaggttccaattgtgacgctgatttatatcatgcaattgaagatgtttgtcatgaaaacgctgagtatatcccgtacacagcaactagcctggcaggttttgatgccgtattagtgcccgggggcttttcatacggcgattatttacgcagtggtgcgattgccaagttggcaccgattatgacggcagttaaggcgtttgcggctgatggcaaaccggttatcggtatttgcaacgggttccaaattttaacggaactcgggttattaccaggcgttcttttgccgaatcgacaaacccattttatctgtgacacagtcgcgttgaacgtgaccaatgccggtacgatgttcacccaacactatatgccgaacgaacaaattcggttgccgattgctcatggtgaagggaattattattgcgatgcagagaccctggaacggttaaaagtgaaccaccaaattgcatttacttatcaaaatgatgtgaatggtagtttagcgaatattgcgggcgttacgaatgaagccggcaatgtcttagggatgatgccccatccagaacgcgcagtcgaaaccttattaggtagcgatgatgggcaacgtttatttgcagcattaatcacatcgattcgaaaaggagggcaataaccgtgttaaagcaaccaacagcggcagaaatccaagccaccaagctttatcagcaatgggggttatcagatgatgaatatgaattgattcgtactaaaattctaaaacggttgccgaattatacggagaccgggttattttcagtgatgtggagtgaacattgctcatataaaaattcgaagccggttttgaaaaaatttccaacaagtggtcagcacgtgttgcaaggcccaggtgaaggcgctgggattttggatattggcgatggtcaagcagtggtctttaaagctgaaagccataaccatccctcagcagtcgaaccctatgaaggggcggccaccggtgtcggcggtattattcgggatattttttcgatgggcgcgacgccgattgcgcttttgaacagtctgcgctttggtgaattgacggatgaccacacgaaataccttgttcaagaagttgtggctggaatcggcgggtacggtaattgtatcgggattccaacggttggtggtgaaatcggatttgatccatgttatcagactaatccactcgtcaacgcgatgtgcgttggtgtcatcgaccaaaaggatattcagcaaggtaaagcgcgtggtgctggcaatagtgtgttctacgtcggggctaaaaccggccgcgatgggattcacggggccacttttgcatcggatgaatttgcagatggcaaggcgacccaacgctcagcagtccaagtgggtgatccgtttatggaaaaactattaatggatgcttgtttggaattaattttgaagcatccagattggctagtcggcatccaggatatgggtgcggcgggcttagtttcttcaacagcggaaatggctgaaaaggcaggtactgggatgattctcaatcttgatcttgtgccacaacgagaaacagagatgtccgcttatgaaatcatgctttctgaatcgcaagaacggatggcgctttgtgttaaagctggtcatgaaacagatgtggttgccttgtttgaacgatatgatctggatgcggtccggattggtgaagtgactgagagtcaacaatatcaattgtggcatggtgggcaattagtggccgatttgccagtggcggctttaacgagtgatgcgccgatttatcataaagcacaaactgaaccagcacgcatcgctgaatttaaagcgatggcgccttatcagccggtgattaatgatgttaaacgaacatggctcgatttattgggccaatccacgattgctgacaaacgctcgctatacagccactatgatgcacaagtgaagaccaataccgtcgttttaccaggaagcgatgcggcggtcgtccgaattcgtgggactaaaaaagcgctcgcgatgacgacggattgtaacgggcgttacttatacctcgatccaaaagtcggtgggcaagtggcagttgccgaagcagcacggaatatcgttgcggcagggggccaaccactgggaattacggattgtttgaactatggcaatccggaaaagccagaggtattctgggaatttgatcaaagtgcccaagggattgcggcggcctgcgaggttttcgatacgccggtcatctctggtaatgtttctttttataacgaattcaatggcgaagcgatttatccaacaccgatgattgggatggtcggtttgattcgagatacagccgacatcacgacgcaaggttttaagtcagcgggggatttaatctacctcgttggccagacggatacgaatttagcgggttcggaactccaaaatatgttgacgggcaaagttgcaggacgattaagcggcttttcgttagccactgaaaaagcgagtcaagattgcgtcttagcagcgattcaaaaggggtgggtgactagtgcacatgatttatcagagggtggttttgcggttgcgttagccgaaatgacttttaaagaacaactcggctgccgcgtgcaagtcccccttaatcaacaacagttatttgttgaaacgcaatcccgctttatcatcacggttcggccagaaaatcagacggcgtttgaagcgttctgtcaagatcaggcgcaattaattgggacggtctcggccacgccaattatgcaagtgcaaacgactgaatcaactgttgagttatcggtgactgaagcgaagttaagttgggagacggcgataccatgtcaaatgaaataaaaagtttaaatgaagaatgtggtgtttttgggatttggggtagtccagaagcaaaccaaatgacttattttggcttgcatagtttgcaacatcgtgggcaagaaggtgccggcattgtcactaatgatcacgggcacttaatgggttatcgcaatcgtggtttgttggcggatgttttccgcaaaccggagcacttaacccaactaaccggggacgcggcaatcggtcatgtccgttatgcgaccgctggtagtcacggtttagaaaatattcagccgttcctattcgattttgcaaccgatcaattcgcacttgcacacaatggtaatttaaccaacgcggtcacactgcgccgcatgcttgaacaatcgggggccatcttaaaatcgagctctgattctgaaattctgatgcatctgattcgacgtgcagaagggcctgatttgcacgcgcaaattaagacggcccttcaacaaattcgtgggggctttgcctacctattattaacgcaagattcattgattgcgatgcttgatcccaacggctttcgaccactctcgattggacgtttagcaaacgggggctacgttgtggccagtgaaacctgtgcgctcaataccgttcaagcaacttttatccgagatgtgcagccaggcgaaattgtgacgattgatgcggacgggttacattctgacttcttcacaaccgaaaccacgcattcaatctgttcaatggaatatatctactttgctcgcccggattctgatatctgtgggattaacgtccatgcggcccgcaaacgaatggggaaacagttagcacgcgaaaccgcagttgatgcggatatggtaattggggtgccgaattcatcgttatcggccgctagtggctatgccgaggaaagtggtttgccgtatgaaatgggcctcgttaaaaatcaatacgtggggcggacgttcattgaaccaacgcaatcccttcgtgaacaaggggtaaaccgcaaactcgccgtggttaaaagtgttgtggctggtaaacgaatcgttttagtggatgactcgattgtgcgtgggacgaccagcaagcacatcgtgaaacgtttgaaagaagcgggcgcattatccgtgcatttgcggattgcgtccccaccattgaagtacccttgtttttatgggattgatattcaaacacgtgatgaactgattgccgcgcatcaaagtattgctgagatgtgtgccacgattggcgcggattcacttggctttttgagtgaacagggattaatcgacgcgattgggttacagcaagatgcgccgtattccggattatgtatggcgtatttcaacggcgactatccaacgccactttatgactatgaagctgcctatcaggcaagtttaaaagcagataaggagcaacaatcatgacaaatgcttaccaaaaagccggggtggatgtgacagccggttacgaagtggttcgtcggattcaaaagcaggtcggcgcaaccaatcaaaatattggtcgcttcggtggtcagtttgccttagcgatggggcagtatgaaaatccggtgctcgtttcaagtaccgatggggtcgggaccaagttgatggttgcttttgcagctgatgcacacgcgaccatcgggattgattgtgtcgcgatgtgtgtcaatgacattgttgcccaaggcgctaagccactttatttcttagattacttagcggctggtcaaacgcagccggataagatcgaacaaattgtcagcggcgttgttgcaggctgccaagctgctgacatgctgttaatcggtggtgaaacggccgagatgccgggtatgtatgctgaaaaacattatgatttagcgggttttgcagtcggaattgctgatcaagctcaattaattactggtgaaacgattcaaacaggggatgtattaatcggaatcgcgtccagtgggattcattcgaatggctactcacttgtgcgccaaattttcttcgaacaacatgggttgtccgtcgacagtcacttacccgaattgcctggtcagacactcggtgaatggctattaacaccaacgcggatttatacacaagcatgtcagccgttgatcgaacaaggctttattaagggcgcggcccacattactggtggaggctttattgaaaatataccgcggatgttgcctgacaacgtgatggccgaaattcaattgggaacatggccaagcttaccgatttttgcggcacttaaacaatatgggcaattggatgcactcgagatgtataacatttttaacatggggatcgggatggtcttagccgtcgcaccagaaaaagcggcacaagttctcgcccaattgaacgctgaacaagaacaggcttaccgaattgggtcggttaaaccgcgacaagaaaatgcaatagaattggtgggttgatgagatgaaagtggcgatttttgcttctggaacgggttctaactttgaagtacttgcagatgatgacgccttaaaaaaagcgggcatggagattatgaacttagtgtgtgaccagccgggcgcaccggtgattgaaaaagcgcgccaacgaaatgtaccggtgacggtcatccgcttaagtgattatgatgatcgacaacactatgaagcagcaattgtcgcgctgttggcaccgttacagttggattatatattgctagcgggttatatgcgggtgattaccccagtattgttgcatacctacccacaacggattatcaatattcatccgtcgttactaccggccttttctgggttacgaagtattgaacgggcctatgcggcacaagtggctgaaacgggcgttacgattcactacatcgatgaaggtgtcgatagcggtccgatgattgtccaagcaaaagtaccattgttgcctggcgatagtttagccgcattggaacaacgcgtgcacgatacagagcacgcgatttatccgcaagttgttgctgaattaattaaaaaccaaaatagaaggagtaattcaatcaatgaaaagagcgttggtcagtgtttcagataaaacaggaattattgaatttgctaaaggattagtagcagctggttacgaggtgatctcaacaggcgggacattcaaggtattacaagaagcgcaagtaccagtaattgcgattgatgaagtcactcatttcccagaaatgttggatggacgggttaaaacacttcatcccaatattcatggtggcttgcttgccaaacgcgacgaaccaacacacatggccgctttagcagcccatgacatccagacaatcgatttagtttgtgtcaatctgtatccttttaaagaaacaattcaaaaatcagggattactgaagcgcaagctgtagaacaaattgatattggcggaccttcaatgttgcgttctgccgctaaaaactttaaatcagtgtacgtggtcgttgatcaacaagattacgcgcaagtcctcgaacacgtcgtcgatgaggggcaagctgcggttgattaccgtcgttatttagcagccaaggcattccgccacacggcagcttatgatagcttaattgccggttatttaaccgaagcagtcggcatcgaattccctgaaaaattaacacgttcatacgactttaaacaagcgttgcgctatggggaaaatgcccatcaaaaagcagcgttctatcaaagcagtttaccaacggctttctcgattgcctcagcggtacaattacacgggaaagaattatcgtataacaacattaaagatgcggatgcggcggttaaagtggtctcagaattcagcgaaccttgtgtggttgcgatgaaacatatgaatccgtgtggcgtcggcttgggtgcaaccatctatgaagcttggcaaaaagcctacgcggccgatccagtatcgattttcggggggatcattgccttgaatcgtgaagtggatgttcaaacagccgaagaattacatagtttattcttagaaattatcatcgcaccaagctacaccccagaagcgttagccattttagaaaagaagaagaatttacgcgtcatgacgcttgattttgaggctgctaagcaagcggattgcttcgaaatggtttctgttttaggcggcttactcgtgcaagaacgtgatcgggtgactgatcaagcatctgaattgaaggttgtgacggacaaaacaccaacggctgatgaacaagctgcgatgttatttgcccaacgtgtggttaaacacgttaagagtaatgctatcgtggtcgcaacaaaggaccaaaccctcggcattggtgcggggcaaatgaatcgggtgggctctgtgaagattgcaatcgaacaagcggaagccaatggattaaaagcaccgttcgtcttagcatctgacgcctttttcccaatggatgacagcgttgaatacgccgcagaacatggtgtgacagctgttattcaacctggtggttcgattaaggatcaagattcaatcgacatggccaaccaaaaaggaatcagtatggtgacgactggtcgccgtcatttcaaacactagccaataggaggcaaatcatggatctattagtaatcggtagcggcgcgcgtgaacacacgattgcgcgtgcgctacagcagagttcaactgttgcaacggtctattgtttgccgggcaatccggggatgcaattggatgggattcaaacagttgcgattgagatgactgactttgcagcgatgattgcctttgcgcaggccaaaaaggtcgcctatacgattgttgggcctgaacaaccgttagtggctggcgtagtggatgcttttcaagacgctggattagcgatctttggaccgcgtaaagcagctgcggcattggaagggtctaaaactttcgccaaagaaattatggcggccgcgcatgtgccaacggcggcttatcaagcctatcagactgtccaagcggcactggatgccctcgatgacgttcgttatcccgttgtgattaaagcggatggtttagcggctggcaagggcgtcgtcatcgctcaaaatgacgtgagcgcgcggcaaactgttcaggcgttctttgaacagggcgtgccccagttattgatagaagattatctcgaaggtgaagagttctcgctgatggcgttggtggcgaataatcgcgtctatccattaccggttgctcaagatcataagcgcgcctttgacggggatcgtgggcctaatacaggtgggatgggcgcttattgtccagtaccccagattagtgaccaatgcgttgcagaagcggtaacgactattttagaaccgattgtggcaacgatggctgaacgtcaaacgccttttaccggtgtcttgtatgcgggcttaattgccacacaacacggggtgaaagtgattgagtttaatgtgcgctttggtgatcctgaaacacaagtggtgctaccacggatgacgggcgactgggcccaagtttttgcacaattattgaagggggaaaccccaacgttacagtggcaattatcaggcattacgttaggtgttgtggtggcttcagatggttacccgacacaatcgacaacgccgtttgttttacccactttgcaacaatttgcaaaacgcaacagcacatttagtttcgctagtgtcgcagaacaagccaatcaattggtcagcgctggcgggcgtttgtataccgctagttattctgctgagacgctaggccgagctagtcaacaggtctatcgggatttagcacaactcgctttaccgacgactttttaccggcaagacattggatttcgaacgcaagtgaaataaccgagtataaatgtttgcttacttttgataagagaaccatgataaaggtattcaattattgaaagaaggaatctatcatgggatatcatacaagtgaagcggaaaatccaatcgatattttaaacttagcgtcgttagaaggacgcgtgaaagaacgaatggaagctggcgcgtttggctatatccgtggcggtgctgaagacgaatggacgatggctgaaaataccagtgctttcaatactaaaaaaataatgccccgtgtgttaaaaggcatcgatcacgctgatttacatactaaattatgggatattgatttaaaaacgccgattattcaagccccctcagcaacccaagggttagcacatgaaaaaggggaagtcgacactgctaaaggggtcgcagcggctggttcgattttctcaattagtacctatgccaatacattggtggaagatgcagccgcagcggctcctgatgcccccaaatttttccaactctatatgagtaaagatgatcaattcaatgagttcttattgaaaaaagccgttaaggcaggtgtaaaagccattattctcaccgtcgattcaacattgggtggttatcgtgaagcggacatcgagacgcaattcccactaccaatgcctaatttagcagcttatagtaattctgacggtgctgggaagggcatctctgaaatttatgctgccgctaaacaaggattagtaccagaagatattcaaaagattaaacaaatcacaaatttgccagtctttgttaaaggcattcaatcaccagtggatgctgaaattgctattcaagctggtgcagatggcatctgggtttcaaatcacggtgggcgtcaattagatggcgggcctgcttcatttgaagtgttgcctttaattgcgcaacaagtcgcaaaacgcgtcccaatcgtttttgatagtggtattcgccgtggtgaacatgtctttaaagcactcgcaagtggggctgatttagtggccattggtcggccaattatttatggtttaaatttaggtggcgcccaaggggtacaatctgtttttgaacacttaaaccatgaattatcgattaccatgcagttggctggtaccaagacaattgatgaagtgaaagaaacaaccttacttgattaatatggtatactgagagtccttggcaggggcactaaaaaaagcggttcaactcaatgatgagttggaccgctttttgacgttaacctaattatttaagatgggggagttcagctaataataattcgctagcgactaatccgagtaggctgacaataacgtacacccagtgagaaccactaccccagctgaatagataagcatcaacaccaactaaaatgataaagagcacgcaatttgtgattaagccgattttgaaagtcaattgactagcaatgacggcgaataaaacgattgaaatgaaaataatgaagaatgcagaaatcaaagtgacgaccacctaacgctatccgatttgaaatactacgctcattttactataaccgcagacgaacaacaattaaatttgtgggggataaagtttactttttgggtgttcgttaacagaatcttcaaatttacagtgtacactaggggatattcaactgatcaagggccgttatcaagccgattaatggacagacttttcactgagcggctatactatcgacaggtgaatttaattaaaagattgggggaactatcagatggttcgtgagacagatttacgagcgcaagatccacgtgttcaacgaacaaagcaacaattacgtcaagccctcattatcttgctgaaagacagtacgccaaaggggatttcgattcaagcaatcaccaagcaagcggcaattactcgcgggaccttttatctccattatgaagataaagtggatttcatccgaaccgcggtggccgatttggtggccgatttttatcagcaagtgactgtagtggtcgatcagacatatcgtcaggtcagtttacaggcactttttgaatatgttgaacaacaacaagctgcttttaaagtgttctataaaaatgaggcgacgcttcactttcaggcacaactgactgaatcaatgcgccaattaatgcaggattacgtggctaagcgctataatcagacttcacaggctgatcaaattgagatgagtattacgattgattatttagcgggggccagtttagcgttggcctttaagtgggtcaatgacgggcttgtgtattcaccacgctacatggctaagatgttataccaattggtacaaacacctaatacgacgttcgatgtcgcacaattttttgtcgaggcgtaataaagcattgactcgccctgtgatattcgatataatatgaacgttgtaattgtgagctccacagctgcaaccgcgcatactaaggcattaagtactatgattagtcaccttagttggcgagtctaagaaaaaataggaggtgcacacatgtacgcaattatcaaaacaggtggcaaacaatataaggtagaagctggtcaagcaatctatgttgaaaagttagccgcagaagctggcgaaaaagtaacttttgatcaagttattttagttggtggtgaaacaactaaggttggtacaccaaccattgatggtgttactgttgatggtactgttgaaaaacaagggcgcgaaaagaaagttgttactttcaaatacaaacctaagaaacacagtcatcaaaagaagggtcatcgtcaaccatatactaaagtgatgatcgacgctatcaacgcctaattgagggaaataagatgattcaagctgactttacggtcaatgccgattcgaaaattatttcttttcaaattacgggtcatgccgactcgggtccttacgggagtgatatcgtctgtgcagctgtttctgctgtctcaatcgggacaatcaacagtttgcaaaagcttgctggttttgaaccagaggtagaagcagataacctgaatggtggtttgttaacttgtcagattccggcaacggtttcgggccaagctttagcgacagctcagattctcttgcagaatttgcagttgacgcttgaagatattacgcaacaatacgggcagtacattcaagtacaaacaaaacgtaaatagacagttaataaacaggaggtgcatttagatgttacaaatgaatttacaattcttctctcaccataagggtggcggttcaacaactaacggccgtaactctgcaggtcgtcgtttaggttctaaacgtgctgatggccaaactgtaacagctggttcaattctttaccgtcaacgcggtacaaagattcatccaggtgaaaatgttggtcgcggtggcgatgacacattatttgctcttatcgaaggtgtcgttcgtttcgaacgcctcggtaaaaacaagaaaaaggtttctgtatacgctgcagaagctaaataattttttaaacacccactttgtgtgggtgtttttttgtgcgagagaagcggggctgtcgtcacattctaaacgtgttccatcagtcatatctctccggttaacccagactgatgtcacactctgtttgtgtaaatccagttttactggtatactaattactcaggcaacaaaccattgacaatctaaaagtgagtgttcagatcgacttttgcttgattgaatacgctaaaagggattggcgggtgccggtccctttttttatagctacttttagggataaaaggctagaaatacttgcttttgagcctgatttcttgctatgattaggacaatggcatacttatataatgctcggaggataaacaatgttatcagtaaatgattttaaaaatggcttgaccattgaatttgacaacaacctatggcggattgttgaattccaacatgttaaaccaggtaagggtggcgcttttgtccgctcaaaacttaagaatttaagaacgggtgccaatcaagaaaagacattccgttcaactgaaaaagttgaaaaagcaatcattgatacaaaatcaatgcaatatctttatgcagatggtgacaaccacgtcttcatggatactgaaacttacgaacaattagaattaccagcagcacaaatcaatgatgaattgaaatacttgaaagaaaatatgcaagtttctatcatgatgtatggtagtgaaaccttaggggttgaattaccaaacacggttgatttagcagtggctgcaacagaacctggtgttcgtggtgatacatcttcgggtggtactaaaccagcaacacttgaaactggcttagtggtccaagtaccgtttttcgttaacgaaggtgatttgttaacgattaacacatctgatgggagttacatctcacgggcataggctaaattagcaagaacttgttaggaggggtttcgatggcagaagaaacaaatattgtacttgatacacaagaaaatgcattgggcaagattcaaatggcacctgaagttgtggaagtgattttagggattgcagcaagcaagattgatggggtccaccaaatgcgggggacgttatcatcatccattaacgaattgtttggtcgttcgaatcacggtaaaggggtaactcttaaggtgattgatggcaaagtgaatgcggatgtttatgtttatctgaactatggtgtttctgtgccgaaggttgcccttgcgatgcaagaagcccttaaagaacaattattgttcatgactgatttagaactagcagaagtcaacgtacacgtggtgggcgttgtcactgaaaaagcaccaaaaattattgatccagatgacttatttaacgatgaaacacctgatcaaaatggagaccaatcttaatgcctaattttaaccgacaccaaattcgccaagctgcatttcaagtgttgtttgcgttaaatgctaatgacacattagaattggcagatgcttaccaagccgttttaaccatggatcaattcgatgctgaagaagttgaagaagttgctgttccagactaccttgccttcttggtaacgggcgtcacagaacatcaagcagaattagacgccgctttaacgccatacttgaagaagggctggcaactatcacggttagccaaaccggatttaattatcttgcgtttagggttgtttgaaatgcaaaattcaacagaagcacccgataaagtggcgttgaatgaagcgctcgaacttgctaaacaatttacagatgatcaagcaaaaggttttatcaacggcgttttatctaaattcgttgaagcttaattagtaaaatacgaacgaaatcacttaaaacacgttaaaaagtatttttttagcgtgtttttttgaatttaaacggtcattatcagctgataacccggaattaaccgattaactatgctaaaatagaaacatcaaatatcgataaataggggttgttaactttggaattactagatggtcgagcacttgcaaatgaattaacacaagcacaacaaatgacggtggcaacactcaaacaacaaggggtaaccccgaaattagtggtcgtcatggtgggtgatgatccagcaagtgcgatttatacgcaaagcaagcaaaaaagagcgactaaaattggcatggcatctgagttaaaacgcctgtctgctgaaacaacggaagctgatttattagcggttgttcgccaactaaatacggatgaaaccgttgatggcattttagtccaattaccattaccaaaacaaattaatgaagaccatattatccgggcgattgacccacaaaaagacgttgatggttttagcccagtcaatattgggcgattatggcttaatcaaccgggcttagtggcctgtacgccaaatgggattatgcgcttattggcagctcacgatattgacgtggctggcaaaaatgtcgtgattgttggccggagtaacatcgttggtcggccattggcagctttaatgctcaatgccaatgccacggtcacgattgcgcacagcagaacggcagacttaaaagccctaacgaaaacagccgacatcttagtggcggccatcggtaaaccacacttcttcggcattgaggatgtcaaagaaggggcggttgttgtcgatgtcggcattaatcggcttgaagatggaacagtcaccggtgatgtcgattttgaagcccttaaatcacatgttagtgcgatgacgccagttccgcgtggcgtggggccaatgacgattacgatgctcatggatcaaacgattgagattgcaaaggaacgtgctaaacgtggttaaaccaacagactatttaacagtcaccgcattaacgcagtatttaaaggctaaatttgaacgcgatccgtatttggatcgggtttatttaaccggcgaaatttcaaacttccgcttacgaccgaatgcgcatcaatattttagtttaaaagataataaagctaagatcagtgccattatgttcaagtccgcttttgaaaagattaagttcactcctgaagaggggatgagagtgcttgttgtgggccggatttccttatacgaagcaactggaaactatcagatctatgtggaacggatggagccagatggtcttggtgcattgtatcaagcctatgaacagctaaaagctaaattatcggctgaaggcttgtttgatgcaccaaagcaactattgccgcgctttccaaaacggattgcggtgattacgagtccttctggggctgttattcgcgatattataacaacgacgcaacgtcggtatccaattgcccaactcgtcttattcccagcggtggttcaaggtgacggtgcggctgatattttagtcgatcgactgaatcaagttaatcaacaaggggatttcgatacaattatcattggtcgtggtggtggttcgattgaagatttatggccgtttaatgaagaacgcgttgcgcgcgcgattgttgccagtcagattccggtgatttcatcagttggtcatgaaacggacacgactattgctgatttagtggcggatgtccgggcagcgacaccaacagcagcagctgaattagcaacaccggttttgacggacgaagtgttgaagttgcaacaacaacgtttgcggttatatcaggcattttcgaaaacattggcattaaacaaaaagcaattggtccacttacagaacagttacgtcttaaaacagccgcaacgcttgtatgacggctatttacaaaatgtcgatcagttgcaccgtcgtttattgttggcgcaacaacaacgcttacagactagtcaacagaatgtacaactcttgcagcaacgcctgcagtcgcaatcaccaagtggtgcgattcaacaagcacaaagaatgttgactgataccgatcatcgtttgaaacgagcaatcgagagccttgtccaaaatcggcggcaacaggctggacaagcggtggcagccttggatctcgtaagtccgttgaaaattttgggacgcggatttgcttatgtaacggatgataatcaaaatgtaatgaaaaaaacgaccgattttacgatcgaccaatcaatcgagttacatgtccaagatggcctcgtgaacgcgcgtgttacggccactcataaaggagacgaataagatggcagaaaagaaattaacatttgaagagaacttagcacaattggaagcaattgtgaatgaactggaaacgggcgatgtgccacttgaaaaagcgatgactgcttttcaaaagggtgttaaattaagtcaaacattagaagaaaccttaagtaaggctgaaaaaacgatggccaaagtgatggcagataatggcgaagaagtcccattggatgttgaggcacaagaataatggttgatttcaaaacgttcgcgcgccaacaagtgcccgcatttgaaacctatttgactgagcaacttgcccagattgaagaaccaaccttgcaaaaagcgatgacctattcagtgatggctggcgggaaacgtctccggccacttttggtatttgcggtgcttgcaagtgtggggcgaccgattaatcaaacggcgtatcgcgtagcgggggcattggaattaattcatagctactcattgattcatgatgatttaccggcgatggataatgatgacttacggcgcggtcaacctacgaaccataaggtttttggcgaggcgcaagctattctagccggcgacgggttattgacacttgcatttgaatggttaacgacgaccgatttgacgactgatcagcagagccgtactgttcgattattggcgcaagcagccggtccaagtggcatggttgctggtcagattgaagatatcgaaggacaaactaaaactttatcgttagctcaattgaaacaagtccatcagctcaaaacgggccgtttgattgaatgcgcggtcggcttaggggcgattttggctgatttatccgatgaacaaatggctagtttacagctttttgcgcaaaattatgggttggcatttcagatccaagatgatattttagacgtgacaagcactacagaagcgatgggcaaggcggtccataaggatgctgacgaacataagaatactttcccaggcttattgggcttagctggtgcaaaagacgcgttggatgagacttgtcaggccgcgcaaactgctttaacggatttatccgggttagataaagcactattaaatagttttttaaactattttaatgaataggagaacagatgaaaaaagaacgggtagacgtattattagtccaacagggattatttgattccagagaacaagcaaaacggtctgtgatggctggtgaagtgtacggtaaaaatgatgaacgaatcgacaaaccgggcgaaaaaatcgacgctgaaactgttttaagtgtcaaagggcgtaagattccgtatgttggccgaggggctttaaaattggcgaaagcggtcgaggttttcaacatcgatttacaggataaaatcgcacttgatatcggttcttcaacagggggctttactgatgtggcgcttagaaatggggccaaactctgttacgcactagatgtgggttataaccaactagcatggaaattgcgcgaagatccacgcgtcgtcgtgatggaacgggttaattttcgttacagtcaaccagaagatttcaccaatggtctaccagattttgccatgacggatgtttcgtttatttcgttacataagattttggtgccgttgaaacccatcttgaaaccggactgcgaagcggttgctttaattaagccgcaattcgaagccggccctgaaaatgtcggtaaacacgggattgtgcgtgatccgaaagtgcataagatggtggttaaagacatcgttgattttagtttagcgacaggctacgacgtgctagggttagatttttcaccaattaaaggtggcgaaggcaatattgaattcttgattcatctacggaatacgacggctgagactggaacgatggccccaaacatgaatattgatacggttttagagaatgcctatgctgctttgaaacgaccaacgggaaaatagtgtataaaactttgtattttatgtataaatgcgctatcattgaggaatagaataatttctcacatgaagagggtgttttaatgcgcaaggtagatcggcaacgactgttaaaaaatttaatccagacccatgagattgaacgacaagaggattttgtgaagctgttacaagcggaagacatcgatgttacgcaagccacgatttcgcgggatattaaagaaatgcagctcattaaagtgccaaatgcggacgagggctatcactatagcctaccgcctgaaaagaaattagacgttaaagaaaagttgcgtcggattttacgtgacgcctatattacgcataaccaacaagactattttgtcgtgattaaagccttaccgggtaacgggacggcaattgctaatcttttggatcaaatgcagctcagtggtgtatttggtacaattggcggcgacgacaccgtgttggtgatttgtaaatcagaagaaaatgctaaacagtttacgaagtttattgaagacttgctaaagtaatttggcaagtttttttagcatcaagagaaacgaaagggggatgatcagatgttacaagagttggtcattcacgattttgcaattatcgatcagttagcaattagttttgaagaagggatgacggtgctctcgggggaaaccggagccggtaagtcaattattatcgatgcagtcgggttactcgctggcggccggggttcacaagactttatccggactggtgctaaaaaagcgacccttgaaggcttatttacgatgacgcctaatggcgcaaccgccgcagtattagaccagtttggcattgaacacgacgaacaaaccgtcttattacagcgtgatttagccgttaatggacacaatgtttgtcgggtcaacggtcatttggtcaatacaaccactttgaagcatattggggaaaccttagttgatattcacggtcaaaatgaacaccaagaattaatgtatccagatcgccacttggggttgttggatgaatttgcgcaccaaaagttaacaaccgcgaaggcagcctatgccgaaacctatgctgcctatcgtaaagcacagcgtgccttgaagcaaaaacagcaaaatgaacaagaatgggcccaacgcttggatatgctgaaatttcaaactaacgaaattgatgcagcccaattacaggctgatgaagaaagcaagttagtcgaagaacgagccaaactaatgaactttcaaaaaattaaccaagcattgcaagccagtcacacgattttagcaggagaagacgggaatgcgttagaccaaatcgcagttgcaatgaatcagatgcaagaaattgctgaactcgatccagaattcaagcgtattgcggacagtctgcagactggttattacacgttgcaagatagtagcattgatattagtcgggaagtttcaaacttagaatgggatgaagcacggttagatgaaatcgaacaacggctagaaactattaataatttggaacataagtatggtgattcaattgccgaaattctcgcttatggtgaaaaaatcggggctgaactagcagcgatgcaagcaactgaagcgaacgcaagtgagttggagcagcaattcacgcaacttgaacaacaacttaggacaaacggacaaacgttgacgcaattacgccaaaaagcagctaagcaacttgaaaaagcggttcatcaacagttaaaagcgttatacatggaaaagacggtctttaaagttgaattcttgccaaatgaacaggaacagttcatggcttccgggatggacaaagttgaattttacattcaacccaaccctggtgaaaaactacggccactcgctaaaattgcttctggtggggaattatcgcgcttgatgttagcccttaaaacgattttctccgaatcacaaggcgttactagcatcatctttgatgaagttgataccggagtgagtgggcgtgtggcccaagcgattgccaataagattagtgaaattggccaacattcgcaagtgctctgcattacgcatttgccgcaagtcgcagcaatgagtgatcatcaatatcaaattcaaaaacaagtgaaacaaaatcgaacagaaacgtccgttcaaaaagtaaccggtaaacaacggattgctgaactggcacggatgttagcggggactgaagtaacagagttaactttagaacatgccgaagaattggtggcattagcggaaacggctaagcaaagtcgccgacattaaaataagggtgcagccaaaatatttttttggctgcacccttatttttttgcttaatttttcttttgaatgtaacgaatttgattgcaaaggacaatcttgtagaggttcgaacgactctcttttagcagatacttgttcgcactgagttgtttaaccaagcgcccggtcacttgttcgagatgatcgttaacattgaattgcaccgcaacatggtagtggcgttcaaacgcttgggtcataaataattgaatctgagcaggttgcatttggggttgttcaacaaaagcagtcgcttctggtgtaagttcaaaaaagcggtgatattgtttaaccaattgttgactgagtccgctaaccgttgcttgtttaaattccatgatttcatcctccgaacacttgtttgtgttttcattatacgaacaaacgttcagaattgcaagcggcattttttgatttttttcgtgtataataggatgaactgatagaaagggtgatttgatgggcaaaattgaatatgaaattatggcagaaatcggtgtgttgagtgaaaatccagctggttggcgtaaagaattgaatttaatctcttggaatcaacgtgcaccaaaatttgatttgcgagattgggcaccggatcatgccaaaatgggtaagggtgtgacgctgtcaaacgacgaaattgcgtccttaaggttaattttaaatgagatggaaacaaagtagacttgaaatttcccgccaaatagtgcagaatagactttaactattttataaaagaagagggaattacgtagatgtccaatcgaggaatgttgatcgttttatcaggcccatcaggggtcggtaaaggaactgtccgtcaagcaatgctagaagatgaatttcgtgattttcactattcagtttcgatgacgacgagaaagccaagaccaggcgaacaagatggtgttgactattattttgtgagcaaagaagaattcgagcaagaaattgcaaatgatggtatgctagagtatgcacagtacgtggataattattatggcacaccgatgaagtatgtgaatcagacactagactcagggcgagatgttttattagaaatcgaagtccaaggcgcaatgcaagtgcgcgagaagtgtcccgatggcgtcttcatcttcttgacaccacccgatttattagaattgcggaatcgaattcaaaaacgcggcacagacgatcaagcaacgattgataagcggatgcaaaaagcagccgacgaaatcaagatgatggaaaattacgattatgctgtcgtcaacgacgaaattccaaatgcggttcaacgaatcgaaaagattatcgaaagtgaacacttacgagtgccacgtgtgatcgaccaatacaagaaaatgataggggaataataatatgattgtatatccttcaattgataagttactagaaaacgtgaactcacgttactcattggctgttttagctagcaagcgggcccatgaaatcgaagccggtgatattaagatgttatctgaatacaaatcacctaaaacggttgggatggcaatggaagaaattgctgctggcaatgtcattattgatcctgattcattgatgcttgaaaaagatgctgaaaaaatggataagctcgctcaaaaagacagcgaataagaataattaaagaacctgcatgtttagtttattcatcgatggatgtttaaattaaagtgcagtttttttagttttagggggttttgaaagtggatttaacgaataaacgaattgcagtttatgtgacaggtggcattgccgtctacaaagtggctaatttggtacgtggattgattaaagcaggtgctgaggtccaagtggcaatgactcaggcggcaaccgaatttgtcacgccactgacgtttgccacattaacgcgtaaacccgtgttaactgatttgtttaatcaagaccaaccggatcgggttgcccatattcacttagcggattggactaatctggcggtgattgctccggcgactgctaatctaatcgggaaactcgctaatgggattgctgacgactttgtctcgaccgccttgttagccactaccgcgcccaaattaattgtgccggcgatgaatgaacatatgtggtttaatccagctacccaacggaatttaacccaacttaaagcagatggctatactgtcatggaaccggataccggctttttagcggaaggctatgctggtgtcgggcggttccctgaagaaaccgcgattatggcagaagttgcgcaacaattcggaccgcaacggttaagcgggcagaacgtggtggtgactgccggtgggacacaagaaccaattgatccggtacgctacattggcaaccggtcttctggtaaaatggggtatgcagtggcccaagcagccgtgacgatgggggcgaatgtgatcctcatcagcacgcgtccagaattgccagtcccggctggtttgcacaaaataatttacgttgaaacggcggcgcaattacaaggcacagttagcagtgtctttgaaggggccgatgttgtggtgatggctgcggcggttgccgattttaaaccggcccaatatgtcacgcacaaaatcaaaaaacaaccgaacacaactgagatgcagttaactttagaccgtaccccagatattttggcgacgcttgggcaacagaagacgcatcaattcttggtcggattcgcggcagaaacagatgatttactacaaaatgcccaaaccaaactagcagctaaaaatgttgatttactcgtggcgaacgatgtcagtcagcatgatcggggctttggtgttgatcaaaatgcggttacgcttttacaaccgaatgcagcaccggaaacattagcgttggcggataaaagggtgattgcgactcaaattctagaacgagttgctgacttgttagattaactaaaaaggaggatttagatgccacaaatcgcaaaagtgattgtcgatgtgccgacgatgcaaactaatcggccatacgattaccaagtaccggatactttattagacagtattcaacctgggatgcgtgtggcggttccttttggcaaaggtgatcgattaattcaaggctttattttgtccattcaggatcaagccaattttgaggggcaattaaagccgattacggcggtcattgatttacaaccggctgtgaattcagaattacttcaattatcaagttggttggcagagcggacctatgcctttcagattacgtgcttgcaaacgatgctcccaagtgtgatgcgtgctaagtattctaagaccgcgcaactagttgatgaaattgatccagccttacaagcaagcctgttcaatggtaacgacgaattaacgtttgaccagtcgctagatcccgaaaagttaaaacaattgatgcagttacaacgccaagggaaaatcgaagtggtctaccatgtcgatgatcgcgcccgcgtgaagcaattaacggcgattgaaccggcattatcgtttgaacagttagaagaagcgcgggccggcttacgtaagtcagcgcaaaagcagagtcaactcattagttatttacaaagtttaattgatcagcccaatcccttattaaaggatgttttggccaagacgacttttacccgggagaatatcaagacaggcgccgacaaaggttggttacgccaagttaaagttgaagcttaccgaaatccttatcctaaaaccgtcacaacgacgcaaaaaatggcgttgactgatgaacaggctgatgcggtagaagccgttgtagcggctactaaggcccaatctgatcgggtttttctagtcgaagggattacgggcagcggtaagaccgaagtctatttacaaacgattgatgcggtcttgcaacaggggaaaactgcattaatgttagtccctgaaattgctttgaccccgcagatggtcaaacgcgtgaagggtcgctttggtgatcaagttgccgttttacatagtggcttatccgaaggtgaaaagtatgatgaatggcggcgaattgaacgcaaagaagccagcgttgtcgttggggcgcgctcagccgtttttgcaccattggagaatattggtgtgattatcatggatgaagaacatgaagcttcctataaacaagatgaaagtccgcgctatcatgcccgcgatgttgccatctggcggagtcagtaccatcattgcccagtgattctcgggagtgcaacaccatcgcttgaatcgcgtgcccgtgcccaaaaaggcgtctaccaactcttgcgcctgacgcaacggattaatcaacagccattaccggcagttgagttggttgatatgcgcgaggcgatgaagcaacaagccagcagcaatttttcacctgcgctattagatgcgttaaaggatcggttgcaaaagggcgaacagagcgtcctcttattaaatcggcgcggtttttcatcctttatcatgtgtcgcgattgtggctttgtcttgcagtgtcccaactgtgatatctcactcacgttgcatatggatacgcactcgatgaagtgccattactgtggtcatgaagaagcaattccgcggacttgtccaaattgtcagagtcgccagattcgctattttggaacgggaacacaaaaagtcgaagcagaactccaagagctgattccaaatgctcgtattctacgcatggacgttgatacaacccgcaaaaaaggtgcgcacgctaaattactcaaacgctttggcgaccacgatgccgatattttattaggcacgcagatgattgccaaagggcttgattttcccgatgtaacgcttgtcggcgtgattaacgccgataccgctcttgggttacctgattttcgggcaagtgagcgcacgtttcaattattgacgcaagtcagtggccgtgctggtcgtgccgataaaatcggtgcggttatcgttcaatcttttaatccggaaaattacgccatccaatttgccaagcaacatgattatgaaggcttctatcaatatgagatggcagtccgccatcggggcggctatccgccgtattattttacggtacagttaacgattagccatcctgaagaagcgttggcagccaagaagagtttccagattgcccgtcaattacggcccgtcttatccgaccaagcgattgtgctgggtccgacgccgaagtcgattgcgcggattaataatcgttatttctatcaaattgtgattaaatataaacaggaaccacaacttcaggcgaaactcgccgagattctcgaaacgacccaaattgatacccgtcatggtttcaagattgggttggacaatgaacccctacaatttacttaaagtgagcgtgattgattaatgacatccatcgtatttatggggactccccaattttcagtaccgattttagaagcccttgtggcacacgattatcaagtcctagccgttgtgacccaaccagaccggaaagttggccgcaagcaagtcctacaacaaacacccgttaaagaagcggctgttcgcttaaacctgactgtttttcaacctgaaaaactcagtggtagtcaagaattagcggacgtgatggccttgcaaccagatttaattgtgacggcagcatatggtcaattcttgccaacgaagttattagaagccgctaagattgcagccatcaatgtgcatggttcactcttgcccaaatatcgtggtggtgcacccattcaatatgctgtgttaaacggcgattcagaaattgggattaccatcatgcatatggctaaaaaaatggatgccggtgatatgattgaacaagccagcattccaattgaagcttcagacgacaccgggactttatttgataagttaagttatgtcggtcgagatctattattgaagacattaccaagcattatcgatcaaaccgcgccccggacaccacaagatgaagcacaagtaacgtttgcttacaatattactaaggaacaagaacaattagatatcgagcaaccagcaacgcaactggtcaaccagattcgtgcgttacggccacaaccaggcgcttggttgccaattaatggtcaacggacaaaattatggcaagcaactgttgctgaaacaacgacggatcaaccagccggtgtgattgtcgctatcaacaaaaaggatttcgaattagcagccggcaatggcagtgttttgaagattaccgagattcaaccagctggtaaggctaaaatgccggtccaatctttcttaaacggggttggcaaacaactcgcagtcggacaacaagtggtggtgcaagatgcctaaaaagacaccacgctatttagctgttgaaattttaacggcggttgccaaacaaaacagttattcaaacttggccctcgaccaagtgattaaacaaaaccacttgaatccccaagatgctggttttttaacgcagctcgtgtatggtgtgattcaacatgaaatgacactcgattattacctagccccctttattcaaaaaccagctaaactggcaacttgggtccgccaagtcttacggacggcagtttttcaacaggtttatttggatcgtgttcctgaacatgcgattttttatgaagcaactgagattgccaaacaaatgggccatgctggcacggctaagttggtcaccgcaattctacggaaccaacaacggactggattgcctgatttagcagcaattgccgatccaatcgaacgcctaagtgtgacttacagtatgccgcagtggttagtggcgaagttccaccaagaattagggcaatcaaaattggaacacttattggcaacgattaaccaaccagcgaatgcgtccattcgagtcaatacccgtgttaattcagttgatgccgttttggcagacttacaggctgacgggttaacgattgaaccgagtgtaattgtagccgctggattagttgcccacggcggtcacttagccagcggtgaattgttcgaacaaggcgcgtatataattcaagatgaaagctcgatgttagtggcaccaagtttgcaactacaaccaagtgatcggatcttggatgcttgtgcagccccaggtgggaaaacgacacatatggcgacttatttggatgccagtcaaggggggcaaattactgccttagacattcatgaacataaagtccgcttgattgagcaaaacgctaagcgtttgcatgttgcagacgtcattgatgcgcgggcgctcgatgcacgcaaagtcggtgaacaatttgaacctgaaacatttgataagattttagtcgatgcaccatgttctggcttaggcttaatgcgacgtaaaccggaaatcaagtatggtcgccaagcagcagacttattgaaccttcaaaagattcaattggcgattttagaagccgttgcaccaaccttaaaagtgggtggtcaattgacttacagtacctgtacgattgtcccagaagaaaatcaacaagttgttgcggcttttgtggccaatcatccagaatttgaaatcgtaccagtagcactcgacaaaccattgccagccaatcaagcgacaccgtttgtccaaatctatcccgatgattatcaaacagacggctttttcatcgcttgtttaacacgacgggcttaaattattaattgaggtgaattcttatgaaagttgcttttcaaaccgatgtcggccaacaacgccaaaataatcaggactatgtcggcttttataccaataaaagcggtgcgcagtttgcgattgttgctgatgggatgggcggtcatttaggcggcgatgttgcttcagaaatggcggtttcccatattgggtacgagttcgaacgaactgatgataccgacattgaatccatggttaaatggttaattttcgaattacaaaaagaaaacaaacatattttagcgaaggctaatcagtatgatgatttgtttgggatgggcaccacgctcgtcgcagtgttgatttcaggtgccaattacttagttgccaatattggcgacagccgagtgtatcgcttccggaataacgaactccgccaattaacagaggaccattccttggtaaatgaattggtgaaacaaggggagttaaccgaagaagcggcaaagcatcatccgcaaaaaaacatcattacgcgcacattaggcgtttcgcaagatgtcgatgccgatgtaacaatttacgaatttgaaccagatgattatctattattatgtacagatgggctaaccaatatggtcgatgatgaacaaattaagaccacgctgatgacaccgacatcgctggaagaaaaatgtgcggcattaattcaacaagcaaatgatgccggtggcttagataatattacggcgttaatcttacatcaaactggtgaggagggtgcgcgatgatggagacaggctacgcggtcaatggccgctatcagattatccgtccaattggagaaggtggcatggccaacgtttatctggcccaagatctgattttggatcgccaagtggcggtcaaggtgctgcgacttgatttacggaacgatccgaacacggtacgtcgctttaaacgcgaagcacttgccacaactgaattgaaccaccccaatatcgtcagtatctatgatgttggtgaagaaaacagcatgcaatacatcgtgatggaatatgtgaagggaacagatttaaagaagtatatcgttgagcacttcccgattccttatcaacgcgtcgtcgatattatgacgcagattttatcagcggtcgaaaatgcccacgcgcacgatattattcatcgtgatttgaaaccacagaatatcttggtcgatgaagcaggtaacgttaagattagcgattttgggattgcgattgcgctcagtgaaaccgcgatgacccagaccaatacattactcggatcagtgcattatttatcaccagagcaagcacggggttcaatggcaacgaaacgttcagacatctattcactcgggattattctgtatgaaatgttaacgggtatggtgccatttgaaggtgaatcggctgtttccatcgcgattaaacattttcaagatgctgtaccacccgttcgagattatgatccgcggattccacaagctttggaaaacgttgtgttaaaagcaactgccaaagatccggacgaacgctacagtgatgttgggcaaatgaccactgatttgagtacctcattatcagctagtcgggcgcatgaaccgaaattcgtgccctcacaaggtgatatgggtgaaacaaaggtgattccggctcttgacccagaagggattacgcgccaaaacaatgcgccagaagccaaacccaaagatgagactgaagtaaaagacgatcagaaaaagaaacagccgcataagaagtcgaagcggaaatggtggtttgtggggcttggcgtagtcttgttagtgatgctcggggtcttcgctgcgtacgcaatgcaaggcagtgaagtgactgttccagatgtgacagacatgacgcaagaaaacgcgactgcagcattaaccgcagataaattaaaagttggtaagattcaaaaaactactagcaataagtacagcaaagggcatgtgattttatcgacgcctggtaaaggaatgcatgttaaatcgggcagtacggttgatctaacaatcagtacgggtcgtaaaaagtatgagatcgaagattatacggacaagccgttcacagatgtcagcacgttattgaaacaaaagggactgacggttgtgcgcaaatatcagagttcacgcagtgttgcttcgggactggttttagaccaaagcattgccgcaggtgaaaaagttgtcccaagtaagacgacgattaccttgactgtcagcagcggcaagccaagcattactttacgcaatttgagtaattacacgaaacaggctgttcaagactatgttgatgacgttggtttgacggttactttttcagaggattactccaatacgattgatgaagggttagtcattagccaatcacctggtagtggtgcatctattcaagaaggtgccaatattaacgtggtactttctaaaggtaaaaaagcgcccgctaccaagagttttacgaagtcgattacgattccgtttgataattccttagcaacttcacaaagtagtacaagcagctcgagcgaatcgggtgacagtagtagtacgagctctagttcaagtagtacttcaacggctacgacgaataagattacgatttatttagaagatagcacgcattcaataatgagtgtttataaagaaatgacgattaccgcggatacaaccgttgaattgccatttacgattaaagcggaccaagccggccgtttccggattttaagaaatggtcaagagattctatctgatgaccatgtgacaaactaattgggaggtgacctattgcagacaggacagattattcgcgccctcagtgggttttatgatgtacaaagtgaaggcaaaatttatcgaacgcgtgcgcgtggtaatttccgtaaacggaaaattacgccacttgtcggcgattttgtcgaattcgagagtgaaagtgaaacagaaagtggctatattcttgagattttagaccgtaaaaatgagatgattcgaccaccagtcgctaatattgataatgctgtcgtaattgtttcggcggtggaaccagcattctccttgaatttgttggatcgcttcttgatttatattgaatcgctgcacatgcaagggttagtttatttaaccaagaccgatatgattagtgatcaacaataccaagaaattagtgattacttggcgtattacgcgaagattggctatcaaatttttgcaccgcggaccgcctttacaccggagataattacggcaattgaagacacgttcccgcataaaacaaccgtctttacaggacaaacgggggccggtaagtcaacgttgttaaaccacattgacccgagcttgaatattgcaactgccgaaatttcgcagagtttaaatcgtgggaaacatacaacccggcatattgaactgattccgttgaatgatgggttagttggtgatacgcctggcttttcatcacttggtttattaaacgtcacgattgaaaccttggttgaccgattcccagagttcagagaaatcgggcaaggatgcaagtttagaacgtgtcaacacgtgatggaaccgaaatgtgccgtgaaagaagctgtcgacagtggcgaaattatgcaaagtcgttatacgaattatttacagtttagagcagaattaaaggatattcggccagtttacaagaagtcaaaataaaaatgtgatcggagttttgatgatgaaacaaatcgcaccttcaattttaagcgcagactttatgaacttacaaagagacgtccaaaaccttgaaaaggcgggcgctgatctattacatgtggatatcatggatgggatgtttgtccccaacatgtcgtttggcccccaagtagtaactggcttgcggccattgacaacgttaggcttagatgtccatttaatggtggaacaaccagaacgctacatcgaacaatttgcagcagctggttcagacttaatcatgattcatgccgaagcaacgcaacatctctaccgtggtcttcagatgattaaagatgctggtgttaaagcaggcgtggtgatcaatccagggacaccagttagtgcgattgaaccagtcttatcattggttgatcaagtcttagtaatgacggttaatcccggttttggtgggcagaagtttattccagcgatgttggataaggtcactgaattagcgacttatcgcgatcaacatgctgatgcagattatacgattgaagtcgatggtggggttaacgaccaaaccatcggtgcgtgtgccaaagcaggcgcagatgttttcgttgccggttcatatacgtttgccggtgatttagcaacccggattgcaactttaaagcaggctgctcatgacgcggattaatgtgttggtgggaggaccagtcagtgagtgggcccccgaattggcgcagccagaaatgattgatggtcaatgggtgacagcagaccgtggtacgtggcgcttattgcaaaaaggcgtaacacctgtcgtgtcagtcggcgattttgattcattgacggcggctgagcggaccaccgttcaatcagcagtaaaggatattcgctctgtgcaagcagaaaaagatgataccgacactcagttggcattatcaattgcgctaactgaatttaatgcggatcaagttgtgctttatggcgcaacaggcggtcggttggaccactttcttgctaatctctttatgcccttagaaagccgttttaagccgtttttagaccgcttagagatgcgcgatcggcaaaatacgattcgcttttatgcaccagggacgtatcaattacaaaaagaagccgataaacggtatctggcctttgtgccattagttcccacaactggtttaaatttaattgatgaaaaatatcgcttggtggattaccaaacacaagtcccgatttcatgggctagtaatgagttcatcggtgagaccggccaatttagttttgaaactggggtggttgcggtgattcaaagtaaggattaaaaagacggctcggataaaattattttatccgagccgtctttttggttgccataaacgtgttcgatcagtcatcgcctgaggattagccgacttatctcgcactttttgccaaaaaaatagaccgccaactggcgatctatcaattgaaattatacacgagttactttgcctgatttcaaagcacgggctgaaacccaaacacgtttaggtttgccatcaactaagatacgtactttttgtaaatttggcttccaagaacgacgagatgcgttcaaagcgtgtgaacgcttgttgccaaatgatgttttacggccggtaataacgtcttttgccatggtcttattcctcctttaagtaaagccggtagaattaacgagaaacataatatgattcagttagtcttaatagttgcatgcatgcacaccggcttatacaattcacttaaataatttaccataatagtttggggaatgcaagagctctttcaaggaaatttacttgacagtccaaaataagtcgtttaaactcattaaagtccaaaaataagccgcatttggggaagaattcatcaccagttgctttgcaactcttctccgctatgctaaaataacaataagtatggcacaaggaggctattttaatggctgttaaaattaaaacacaatatggcgatattgatattaccaataacgtgattgcaaccgtcgttggtggcgctgcaacagatatctacggaattgttgggatggcaagtaagaatcaaatccgtgacaatttaaacgatattttgaatcgtgagaattataatcggggtgtcgtagtccgtcaagaagacaatggcgttgcgattgatgtctatattattgttggttacggcattaagatctctgaagtttgccgtaacgtccagagtaaagtgaagtacaatcttgaaacaatgttgggtgtcggtgcgaactcagtgaatatttatgttcaaggtgtacgggtattagaagactaaaactaattagcggagctggccactaggtccagttctatttgtttttgttcaaggaggaacattcgtgaaagttactgaaatcacagcagcagaattccaagcaatgatgcgggttgctgcacatcggcttactaaaaatgcagaatttgtcaattcattaaacgtctttccagtgcctgatggggatactgggaccaatatgagtttaacgtttcaaagtggggccaaagcagttaatgaaaacaacgcgcaatctgtcggtgaattatctaagagtttagccaaggggcttttgatgggcgctcggggtaactccggggttatcagttcacaaattttccgtggtttttctaagagcatggctgaaaaagaaacgttggatgcacaagatttggctgacgcattcacaaatggtgttcaaacggcttataaagcagtaatgaaacccgttgaaggcacgattttgacggttgccagaaaaggcgccaaagctggtgccaaggttgccggtcaaactgatgatatcggtgcagttatcgaagctgttgttgagggttctaagaaggccttgttgaagacccctgaattactccctgtcttaaaagaagtcggcgttgtcgattctggtggtcaaggattggtcttcatctatgaaggtttcttagaaggtttaacaggccaagcacctgcaaaagatctttacacacctgatgaagcggaaatggatgaaatggtcaatgccaatcatcatcaaaccgctcaaatgggtacagaagatattgaaaatggttattgtactgaaatcatggtcgcccttggtgacgggacaactgtcgatcgcgaatttgattatgatgaattccgcaatcatttaaacggtgttggtgactctctcttagtggtagccgatgaagaagtggtgaaggtccatgtgcatacagaacatccagggacagtcatggcttacggccaacactttggttcattagtgaagattaaagtcgataacatgcgtttacaacatgatacgattgttgaaaacgaccaacaagctgctgcccctgtgcaagcagaacctgttgaaaatgggattatcgcgattgcggccggtgatgggattgctgaactcttcaagagtttaggggctacttatatcttaagtggtggtcaaaccatgaatccaagtacgcaagatattttagatgcgattaaagcagccaatgctaaacaagtgatcttattaccaaataataagaacatcttcttagccgctgaacaagctgccgaagtggctgatattccagttgcaatcgtgcaaagtcggacgattgctcaagggatgaccgctctcttatcatttgacccatctgctgaattggctgttaatcaagaagccatgacagaggcgttagataccgtgattagtggtcaagtaacgcaatcaatccgggacacgactttagatggacttgaaattaagaaagacgattacatggggattatcgatggtaagattaaggtctcaacggctgaacgtttaacagcagccattgaaatggtccaaacaatgcttgatgaagacagtgaaatcgtcacaattattatcggggaagacggcgatgcaacagaagctgaacaaatcagtgatgcaattatggcccaagacccagaattagaagttgaagtacacgaagggaatcaaccagtttacccatacttgatttcagttgaatagttaatcaaataaaacgggaatgaggttgaatatacctggttcccgttttttagtagaagtacgtttaaccttggaatatggttaaaaagcacgttaagaaaaagaagtgtatcaaaagtgcttatcctgtgaggattagtttaattagccgaatgactagcgtagctacttgtttggctaatggtgctaaacgcaacaggatgcttttgaaagcacgttacaggaggctgtcaatgttaagtttaacggattctgttgctgtgttagctggcgtcggcccgaaacgtctgacagccctcgatcagcttggcataaggaccattagtgatttattgtattattttccgtttcgttacgaagatttgaaggtcaaggatttatccgaagcggcagatcaggaaaaggtgacgttaaaaggaacggtcgtcgctgatccgatcatcagtcgttggggaccagggaagacccggctgaatgtacggctcttgattgaacatgacgttgtgatggttactttttttaatcaaccctatcttaaggacaagtttgaagccggggtcgatgtcgctatttatggcaagtgggatgctaaacgtcatacattgacggggatgaaggtcctagcggttcaatcggctgagaatccatcgtttgcggccatctattccgttaataaaagtgtgcgtcaagggacactggtcaagatgattcaagaagcctttgatttgtatcaagacgttattcccgaattgatcccagaggatattcgcacgcgctataagttaatgaacgaacgcgacttaattgctggcatgcatttccctaaaacgtatcctgaagcaaagcaagcacgccgaagcgctatttttcatgagttcttcctatatcagattcaattacaagccattaaacagactgatcggcatgtggcaaacggtttagctttgcagtaccaaaatgaagcacttaaagattttattcaaaccttaccgtttgatttaaccgatgcacaaaagcgagtggtgaatgaaatttgtcttgatttaaaatcaccagcgcatatgaatcgccttctccaaggggatgttggttctgggaaaacgattgtggcggcgattgcgctgttcgcggcagtgactgcgggttatcaagccgcattgatggtgccaacggaaattctggcggaacaacactatcaaagcttgcaacgcttattggcaccaatgaacgtgactgttggcttattgaccggttcgacgacggctaaagaacggcggacgttgttggcagacattgaatccgggcgcatcaatattattattggcacccatgccttgattcaagatgcagtggtctatcataagttaggctttgctgtaattgatgaacaacatcgtttcggggtcaaccaacggcgaattttgcgtgaaaaggggttacagcctgatattcttgcaatgacggcgaccccgattccgcggacgctggcgattaccgcgtatggcgagatggacgtttcaacgattgatgaattgccaaaaggacggattccaattgaaaccagttgggtgcgtagtaatcaagtcgaacaagccctcagctttgtccgtaaacaacttgcaaacgattcgcaagtctttgcgattacaccattgattgccgaatctgaacagatggatttaaagaatgccgaggagatttacgcaacgttggtggaacaatttgaacctgattaccatgttgcattgttgcatggccagttaaaagatgatgaaaaaaatcagattatgaacgctttttctgagaacaaaattcaattactggtttcaacaaccgtcgttgaagttggtgtcgatgtgccaaacgcgacggtgatgctcatttttgatgcggatcggttcgggttggcgcaattacatcaattacggggccgggttggccgaggtaagaaaaaggcatactgtattctggtggctgatccgaagaaccaacaaggtgttgatcggatgacgattatgactgaaaccactgatggattcgtcgttgcgcagaaggatttagaattgcgcgggccaggggaagtctttggtgatcgtcaatctggattgcccgtctttaaagttggcgatccagtagccgactttgcgagtttacaagtcgcccaacaagaagtgcaaaaaatcttcacgcttgatcctgagttggcagcaccggaccatacgccactcaaaacatacttacaacaacaaaagcaaaattacctaacgttagattgaaaacggaaagaggaatgatgatgaaaattgcagtagacgcaatgggcggcgattttgcaccccaatcagtaattgaaggggtgttacaagcccgctcagaattaacagatgttgaatttacgttgtatggtgatgaagcacaaattaaaccgttgattgatgatatgacgcggttaacgattgtgcataccaccgaaaaaatcaccagcgaagatgaaccagtgcgtgcgattcggcgtaaaaagcaagcttcaatggttctggcggcgcaggcagttaaagatggggaagcagacgcactcttttcactagggaatactggtgcgctcttagcagccggattattcgtgattggtcggattaaagggattgatcgtccaggtttaatgcctaccctaccagccattaattcagatttaggcttcaatatgttagatgttggggccaacgccgaatcaaagccggagcatttgcatcaatatggcttaatggggaacttctacgcacaagacgtccgtggcattcaaaagccgcgaattggtttgttgaataatgggactgaagctggcaagggtgatgagttgcataaggcagcacatcaactactggcagatgatctaacgttaaacttcattggtaacgttgaagcaagtgaactcttaaaaggcgttgcggatgtcgtggtcacagatgggtttaccggcaatgcgacgcttaaagcaattgaagggactgccacaatcgtgatgtcgcaagtcaaacatgcgattatggatgctggtgtcaaagaaaaaatcggtggtttactcttgaaaaagagtgttggtgggattcgtgataaattcgacacatctgtttatggcggggctgttttattaggcttaaaagcccctgttgttaaggcgcacggtgctgcagatggccgcacggtttactacactgttcgccagattcatgcaatgctggcgaaccaaacgattcaaaaagtaatcgattattttgaccaacaaaatagcccaaaagaaaccgattaaaataggtggacaatgtgttccaaaggcgctacaatatacttcgcaagtctgatttgatttacttgaattgagttgcgaagttatgtataatcactggatacccaaagtgttaagtacgtaggtaagggtttcaatttggaggtttttaattatgaatgaacaagaaatctttgataagattgcggctattattggcgatcgatttgagttaaataaggatcaggtaacagacgaattgaacttcaaggaagacttggatgctgattcaattgatattgtggaatttgttttggaattagaagacacttttggtgccgaaattccggatgaagaagctgaaaagatcggtacggtagctgatgccgttgcttacattaaaacaaaaatcaaataataaccttgaaaacgagcctgttggttgtgagtattcgcgaccgacaggcttatttttttgcattttaaacagtttgtgaaaatgagattattcacataataatcatttgcggatgcgttataatattagaatgattcttataatggctctgcatcaatgaaaataaattagaatattttaatctttattatttacttttcatttttaatcatgtattattatttttaataactgaagggagtgtccatatgaaacgagaaaagagtttggtattaggtataacaacagtggcggtcacattattattagcagcttgtggtaactcaggtagcaaggaagccgttaagactgacacagccagttttgcaactggggatgtcattgcgacaatggattcagcgttaaatacggatgtgatcggtgcacaggctttaaccgatacgatggaaggtctttaccgctacgagggtaaagaaattaaaccggcgattgcgactaaagtagtcaaaccaactaataacggtttaacatatacattcccattaagaaaagacgcgaagtggagcaatggtcaaccggtcacggcagaagatttcgtttatgcttggcgcagagtcgttgatccaaaggtcggttcacaatatgcttatatctatgaaggcattaaaaatgcagcagacatcacgactggtaaggaaccggttaattcattgggtgtagtcgctaaggataaacacaccttagaagtcacccttgaaaaaccaattccatacttcagtcaattgatgaccagttcaacattcttcccccaatatccagaagcggtcaagaaagctggcaagagttacgggacaaattctaaaacattagttttcaacggcccttataaattagaaaattggaatggcccagatagctcatggaaagaagttaaaaacaccaattactggaatgcgaaagcagttaaggttaagacgttgaagtatcaagtggttaaagatccatcaacagctttaaacctcttccaaagtaataaattagatcggacggcgatcagtggtgacacagctaaacaaatgaaaaacgatccacattactcaaccttacaaaaagcagcaacattctacatgcaagtcaaccaagaaaagaatccaatctttaaaaatgcgaagattcgccgagcaatttcaatgacaattaatcgtaaagaattagtcgcacaggttctaggtgatggttcaagtccaattgcttctgtgacaccaaagaatatgtcatttgacccaacaactaagaaagattttgttgatgatttagacgcagcgggtaagaaaaatgtaagttacaaccctaaagaagcaacaaaactttggaacgaaggccttgctgaaactgggcaaacaggcaaaacattcaattacacattacttggcgatgatacggatactgccaagaaacaatccgaatatctccaaaacacattacaaaagaacttaccaggtttgaaagtcacattagcgaacgtgccatttaagactcgtataacacgttcaacgaacggtgatttcgacatggtggttagtgcttggaacgctgatttcccagatccagtcacattcttagacttgtttgtaacaggcggcgataacaataatggccattggagcaatgccgaatacgatgcacagatcaaggcaagtaaaggtgacaacgccaatgatcctaaagcaagatggcaaaaccttgttaaggcacaagatattatgaatacagagtcaggtgtcattccactgtatcaatcaggtgtggcgtacttaactaacccaagccttaaaggtttagactacggcccttcaggaagctacaataatgtctcactttatttaaaaaaataaactgactttataaagatgggtttcagcgttgaaaaacaatgaagcccgtttttgttaggagcgaacttatgagtaaataccttgttaaacgaatattctatttagtgctaaccctattcattgtcgcttctgtgaccttcttcatgatgaagttgatgccagggacgccatatacgaatcaggaaaaaatgagtgctgatcaattacggatcatgaatgaacagtacggtttgaacaaaccattaattcagcaatatttcatctatctaggtggcttgttgcatggtgattttggcacatccttccagttcaacaatcagcccgtcttgagcctaatcatgacgcgtttaggaccttcattacaaatcggggcacaagcgatgattgtcggctcattactgggtattttactaggggcagtggcggccattcgcaagaatacatgggtcgatggcgttgcaacgttcttttcaatcgttgggatttcaattccgaactttgtgttggcggtcttactccaatttttccttgcctttaaattacaactattcccaattgcgttatgggacggctggtcatctagtgtcttaccaacattagcactagcggttgcaccattggcgaatacggcccggttcatgcggactgaaatggtcgatgttttaaacagtgattacatcgaactcgctaaagccaaaggcaattcaaaatggcaaacagtggcaaagcatgccttacgaaattcaatgattccagttgttacgattatcgggccgatggcagtcaacttgatgactgggtcactagttgttgaaaatattttctcgattcccgggattggggaacaatttgtgaagtcaattatgacgaatgattatccaacaatcatgggcttgaccattttctattcattcttattaacagtgattattctagtcgtcgatattctttacgggattattgatccacgaattcgattaagtgacagtcagggggcgcactaaatggcggatattaaaataccagcgggctcattcaagccccttacacaagacacgcatgaagcacaagaaaaaattagtgcaccatcattgacgtttacgcaagatgccattcggcgcttaaagcaaaataaagttgcggtggtttcattagttgtcctcttgattgtgatgttggctgctttattggcaccagtgattgcaccacaaagtccaaatacacaaaatgtggcgtacgctaacctaccccctaaaattggatcggggaatatccctggttttaccggtaagatggacgtttccggtgttaaagttgataaatatcaacaagcgggcgttcccaaaggcaaaacgtttatcttagggacggattatctcggtcgtgatttattatcacgaattttatacgggacacgcttatccttattaattgggattctagcgacattggtcgatttattaatcgggattccatatgggattgtttccggatggcgtggtggccgtttggatatgttcatgcagcgggtaattgaaatcatttcatcaattccaaacttaattgtggttgtcttgatgatgttggtactccgtccaggtttattgtcaatcgtcatcgcgattgggtttaccggttggattacaatggcccggttgattcgggctcaaacgttccaacttaaggaacaagaattcgtgctcgccgcacggacgttgggtgaaagttccaccaagattgcttggaaacatctgattccgaatttatcctcaacgattattattcaaacgatgtttacaattccgagtgcgattttcttcgaagcattcttgagctttatcgggattgggattccagcgccgaatgcttcattagggacgttattatcagatgggcaaaaagctttccgtttcttgccatatcaaatgtggtatccagcagcagtcctctgtgtgatcatgattgccgtcaacttactagcagacggattaagagacgcattcgatccaaaatcatagcgtgtgtaagtaggcggttatctttcgcggattagcatagtctggcgaataatcaacttgttgattatttgttagacgtagctaaccataaaaagcagttaatgaaagcacgtttagaagcagagtcagtttcaaaaagcatgtcaatacaaggccgtttccacgcggtttcatcattggaggtcgtcaaatggcaaatattttagaagttaaacatttaagtatcgattttaaaacctacgcagggaacgtccatgctattcgcgatgtcagtttcaacttgaaaaaaggcgaaacactagcgattgttggtgaatcaggttcaggtaagtcggtaacggtccgtagtattatgggcttgttagcgggcaatgctcaaattaagggtggtacaatcaagtatcacaatgaagatctcttacaaaaaccagaacaggaaatgaatgccttacgtggtagcgatatttccatgattttccaagatccgatgacgtcattggatccaacgatgccgattggtaaacaagttgctgaacctttgttgattcataaaacaatgaataaggaagaagcaatgaaacgtgcacagagtgttttagagttggtgggtattccgaatgccaaagcacggatgaaagattatccgcatcaattttctggtgggcaacggcaacgaatcgtgattgcgattgcgattgttgattatccacaaatcctgattgccgacgaaccgacaaccgcgcttgatgtgacagtgcaagcacaaattatcgatttgatgaaggaattgcaacgcaagattgaaacctcaattattttcattacgcatgatttaggtgttgtggcagggattgccgatcgcgtagcggtaatgtatgctggtaagattatcgaatatgggttggttgatgaaattttttatcaacccaagcatccatatacgtggggcttattgaactcaatgccaacacttgatacttctggccgtcttgaagccattccagggaccccaccagacttgttggatccaccaaaaggggatgccttcgcaccgcgtaatccatatgctttacaaattgatgtggaacaggaaccgccatttttccaagtgtcgaaaacgcattttgcggcaacttggttgttgcatccagatgcaccagctgtagaaccaccagcagccgtccgtgcaatgatggctaagtatcaggcgacacaagttcaagagaaagtagggacaattgatggacaaggataaaaaagtattagtgtcggttaaacatttaaagcaatattttagccaaggaaaaaaatccgaagtcaaagccattgatgatgtctcatttgaaatctatgaaggcgaaacgtttggcttggtgggtgaatctggttctgggaagagtacaactgggcggagtatcatccggctgtataacccgacagatggtgaaattctattcgatggccgtgacattagtaagattaaaaatcatagtcgtgaaatgaaggcgttccggaaagagattcagatgatttttcaagatccctacgcgtcattgaatccacggatgaaagtcaaagacatcatcgctgagggcttgcatatccatcatttggttaaaaatgatgcagaatgtgatgcacgcgtcaacgaacttttggaattagttggtttgaataaagaccatgcaacgcgttatccatatgaattctccggtgggcaacgccaacgtattgggattgcccgcgcgcttgcggtaaaacctaaatttatcattgcggatgaaccgatttcggcgcttgacgtatcgattcaagcacaagtggttaacttgatgaaagaaattcaagaacagcaaaacttgacgtatttattcatcgcacatgatttatcgatggtgaaatacattagtgatcggattgcggtgatgcataacggtaaaattatggaattggcatcagccgatgacatttatgatcgaccattgcatccatatacgcaaagtctattgtctgctgtgccgttacctgatccaaaggtcgagcggcaacgtcggcgaattgcttatgatagttcaattgaggcagataatgaaggtcgtcaattgcgcgaagtggccgatgaacactatgtctatgcaactgaagctgaactagcgagttatcaaaccgctttagcagcaatgacaacgccatctgcataaagcaacgcctgttttgaaatattcgtttgcgtgttacaatgaatacttcaaaacaggcgttttttagtgattaataaaagaaacggtttgctaggaacgacgctgtttttttaagcgtataaacggtataatagtgaaagattaaacagttgaaatggggtaatttaattttggatgcagcactagtgagcgagcttcgagcccgctacggcattgaatttcagaatttagcactattggacgaagcctttacacattcgtcatacgtcaatgaacaccgggagttgggtcttcgtgataacgaacgactcgaattcttgggcgacgcggtgatggaaattacggtttcagaatacttatataaaaaatatccggactggccagaaggcaaactgacacgcttacgggcggcaatcgtctgcacgaagagtttcagtagttttgccaaagaagcgcactttgatcgatacattcgccttggtaaaggggaagaaaaaaacggtgcgcgggcacgagcaacacttttggaagatttatttgaagcgtttaacggcgctttgttcttagatcaagggcgtggcgcagttgttaaattcatcgaacaagttgtctttcccaagattgaagccggtgaattttcagaccaaacggattataagaccaatctgcaagagttcttgcaacaagatggtgaagttgagattgaatataagttattggcagaagtgggaccatcacatgcccgtcaatttgaagtggatgttatgatgggcgatcgcgtcttaggttcaggtgttggccgaaacaaaaaagcagccgaacaagcagctgctaaagtggcgcttgccaaactgaaataaagaaagaagcaaacgacagttgaaaccaaccgccgtgtgtagggagtttagtgcatgcagttaaagtcattggttttatcagggtttaaatcatttgctgataaaacagaaatcaatttttcagaaggtttaacgggcatcgttggaccaaacgggagcggtaaaagtaacgtcacagaagcaattcggtgggcgatgggcgaacaatcagccaagagcttacggggcgaaaagatgcccgacatcatttttgccgggactgatattcgaccacagatgaataaggcagaagtgacgctggcttttgataacagcgatcaatatttgaaacaagaacaagccaacataacgattacgcggcgtttatttagaaatggcgatagtgagttttatttgaatcaaaagagttgtcggttaaaagacatcgttaatttatttatggattctggccttgggcgagaatctttttcgattatttcgcaaggtcgggttgaagcaattttcaacagtaaaccagaagatcggcggaatattattgaagaagcggccggtgttttgaaatataaacaacaaaagaaaaaggctcaatctgaattagatcaaacagatgaaaatttgagtcgggtcaccgacattcttcatgaactacggggacaagttgaaccgttgaaggaacaaagcagtattgcgcaggattacttggatcaaaaagcgcaatatgatgcgttgcaccaacaattattggtgattgaaattgatcaattagtggctgatcaaaagacgtacaaagaaaaggcgcaaacccttgcgcaagcgttgcaagagattgaagcggacatcgctaagacgacggctgcccaaaccgagaatcaggcaaccttagcccagttggaacaacaaatagaacaagataatcagacgttgttagaaaagtctcgcttggctgaaaatctattaggccaagagaacgtttcaaaagagcgcgctaattatacggatgcgaaccgccaaagtttagtcgaacagatcgacacattaaaacagcaattaacggcggaacaagccaatcaatctgaattaaaggcaagttatgaagaaaaggtgacggcattaagggcgttgaagacggagttaaccacccttaaacgccaagcgtctggtagtgaagcggaactgaaagcgaagattgaacaaattcgtcaagaatacatcgatcagatgcaagcccaaacgaccaatcataatgaacaacaatatttagaaaagaacttgttacaaactaaaacgcaacttgcacggcaagatagtgcagtcgatgagacatcgacgcaattggcacaaaaaaaggcagaacaagcggcccaaaaagcccaacttgaaacactcaaagcgcaatacgaaacgttgtccaatgagttggccgaattacaaacgcaaattaacacggaccaagcggcttaccaaaatcaacaaaatagttggttccaagcgtctggtattttacaaaaagcgaaagcaaaacaagccagtcttgcggaattaaatgatgactacgccggcttttatcaaggggttaaggctgtcttgaagcaaaaacaacagttccctggtttattaggggctgtagcggaattgatgcaagtgcccagtgagtatcaacaagcgattgaattagcattaggcgcacagctacaacaagttgtgacacgggatgaacagacggccaaacaagcgattgagtatttgaaaaccaatcggattgggcgggcaactttcttacccaataacgttgtcaaaccacgtttactaccaagtagcttagttcaccaattacaacagcagcctggatttatcggaattgccagtgagcttgtgcagtttgatgaacaagtgcgaccggtgatgaaccatttgatgggcaatttgattgtcgcgactgagttggagccggcgattaaattgagtcaattgacggggcatcgttaccgaatcattacgttagcaggggatattttaagcccgggtggttcgatgactgggggccataataaccgacaaaacaatggtgggctacttgcgcgtaagcaaaccttgactgatttagaaggtcaaattgccaagatgcaggtcgctttggatcaaaagcaagccagtgtccaagccgcaaaagctcaattaacggcacgccaagcagaattaaatacgaaacaagcggcattggaaaccgctaagaatcaatatcaagctgcccaaaatacgttagccttgactgacgaacgtttgagtcagtttgaacggcaacaacaagcaaccgattatcaagtgcaacaacaacaacaagcttatgaggaagatttaaaacgccaggcagaattagtggcagccgaagctgaaattgttgcgtcgattgcacagctgcaagcagatctcgaaacagctaatgagcaattacaacattttgatgagagtcaaaaacaaattgcgcaacaacaaacagccctcgaaaccaagttggctgtcgctcaagctgaacaaaagaatgttcaggagaaattaacggttgctactcgcaatagcaacgacctggcagcccagttgaaggccagtcaggataaactagctgcgctaaaacaagcggatcaagaagatgcttcgagtcaaaaagaacgacgagcactgctaaaggcaaccaatgctttgattgagaaagtccaagcgaagttagccactgaacgcgcgcaaaaagaaacgctgaaggcggaacaacaaacgcttcaagccaatgccacacgcgtctaccaattacaaaaaaatagtttagctgagcaagaacaaaatgctgtcgggctcaaccgggttaaaattaacattgatcaacgcttaaatacattgagcgaagattaccaattgacttacgaagccgccaaggccgctttggccgcatcagacttaaccgacgatcaattgcggtctaagttgaaattattgaaactcggcttagctgatttaggaacggtcaacttggcggccattgatgattatcaacatgttaaagaacgttacgatttcttgatgcaacaagatgccgacttgatggacgctaagcgccaattattagcatcgatggctgaaatggatacggaagttgaaaagcggtttaaggaaacgtttgaacaaactgccgctgcttttgaaaccatcttcccgatcatgtttggtggcggccatgccagtttaacgttgacggatccaagcgcactattaacgagtgggattgacattattgcgcaaccacctggtaagaaactacaacgcttgagtcttttatctggtggtgaacgcgcattgacggcgattacgttattgtttgccatcttaaaagtacgcccagtgccgttttgtattttggacgaagtcgaagcttcgttggacgaagccaacgttgatcgtttcggtcgtttcatgaaacgttatgagagtgatacacaattcatcgtgattacccacagaaaagggacgatgacccaagccaatcgcttatacggggtgacaatggcggaatctggaatctcgaagattgtttccgtttcattagaagaacacgcaacagcctaggaggaaaaccatgggattatttgatcgtattaaaaaagcattctcagccgaaccagaaaaagaaacaccggttgaacaagaccaagcgataccggaaacaccggttgaatcagacgctacgccggttgaatcgcaaacccctgcagaaactgcggcagctgagaaaactgaaaccgatgaaccagccagtttagcaactgaagatgattcagaaacggtatcaccgcttgacacaccaacggcggcacccgtaaacccagaaccagaaccagaaccagaaccagaaccagaaccagttgaagcgtcggcagtaactgaagaatccgatgcgattgaagaagtgccggaaacagaagcagtaactggcgacatgcaagctgctgaaacgaagaagtatgatgatggattagaaaaatctcggctcacatttgggcaacgcttaaatgcgttgttcgctaactttagaagtgttgatgaagcctttttcgatgatgttgaagaaatgttaattgaagccgatgttggctacgaaacagcgatgaagattgctgacgaattacgtgacgaagtgaagttgcgtaacgttaagaaaccagaagcggtttcacaagcgattgttgaaaagctagttgatttgtacggtcaagaagaccaagcagaagataatcaattgcatttcgctccacaaggcgaattaactgtcttcttattcgttggtgtcaatggtgcagggaaaacaacctcaatcgggaagtttgcccaccaattagaaaaagcgggtaagaaggtcttattagcggctggtgatacctttagagcgggcgccatcgaacaattacaagaatggggtcgccgggataatgtccccgtggttgctagtgcagcagggagtgatccagcgtcagttgtctatgacgcggttaagcgcgctaaagaagaacaattcgatattttattagttgatacggccggtcgtttgcaaaacaacgtcaacttgatgaaggaattggaaaaagtgaaacgcatcatcacgcgtgaagtaccagctgcaccgcaagaagtattgttggtcttagatgcaacaaccggacaaaatgctttagtccaagctaaacaattcaagcaaacgaccgatgtgactgggattatcttaaccaagctagatggttcggccaagggtgggattgtgttagccgttcgcacagaattacacttaccagtgaagatggttggtctaggtgaacaaatgaacgacttacaactctttgatccaaaccgctttgtttatggcttattcaaggatattattgtcggtgatgggccacaaagtgacgtagatactgacgttagccaggcaattaaatgaaatttgtaacttcagatcaaattacactggattatactgatattggtgaagggcagccaatgctttttatcgctggattcggggcggccaaggaaatttggcatgcgcaagcagccttttttgaagctcatcattatcgagtgattcaactagacgttcgtaatcaaggaatggcacaacatactgtcaagggcttgcgaatgtctagaatggcgctggatcttgctgaagtaatcaccaagcttggattggccaagccaattttagtggggaattcaatgggcgctgcttgtatttgggcatacatgtcgctgtacggtgatcgtgacttagacaaagtcgtgattgttgatcagtcacccaagatgattgcggatgaaacatggtcgtttggttttaaggatttgacttgggatagttttccgctgcaattgcgtttggattttggtaaggcgacttaccgggcaatcgatacggatacggctgatgtggtggcacaagtcaagcaacaatcaccgtttgatcggcagcttgatttaccgttgttggtcgatcatgcatttcaagattggcgggatgtgattcgccagagtatgcgcccgtatttagtgattgcgggtgaaaagagcccgtttttcaatccagccttcgcaccaatcgtggcacaaatgggtgctgatgggcatgcacaggtgattgaagaagccggacacattgtgatggcagaacaatcagccctctttaatcaaatcgtattagcctttatcaaggcctaaaaaaccgccaagacagtttgtcttggcggtttttttgcgttaattgtgaatggctaggattttggtagcagttggttcatctaaaacaagatcggtgaggaagttaccgcgaagtgcagctgcaacggcatggcttttaaatttattgttcacgacggctacccgaatcggcacttgtaaaatggaatcaatggctaagccaaatgttttgtcggcaatgggattgattaagaattgaccagcatgattgaatggtcgaccatataaaaagccagcgacttccttgcgattgagattagggaacaatgcaactagactctcttgccaactaggaatagattctaatgattcaattgttcctaaggtagtgagaattaaatccatctgacgcgcggtggtgagggtgggttgaatcgctggttctaaacttaagagttggcgaacctgatcattgatgatgtaaagcggcgcattgagggttgaatagtggctattgtatttattggcggccttttgcaccatgcgcattgagcccgccagtgaattatacttgccattttcgcccataaattgagtgaaaattaactgttccttgaccgttggtttaaagtgttcgataacgttatagacggtgtctccccaactgagaccaataatttttaaaggattaatcagattttgaaccgtttgtgccgcaaatgagtaaaaacgatccgcatcattattgctttgttcagcgttcgctaggacatagaagtggtggccaggattgacggcggccaattggcgttcaagttcttggttccgtgcaaaaggggagcggatactaattgaaacgatattctgggcgagtgcctcatcgagatactttgagatcatgtaacgactcacctgatatttcgtcgaaatatcagcgatggttaattggttgatatagaaatcttgagcaatatcgattaataggttggtatttgtttgttcggccatgggctgctccttgaatgaatttattcgcaaagacgaataaaaaaattttatatattaaatatagcgctttctatttacaaagtgaagcattagacgtattattaatttaaaatattttaaaaataatcgtgttttttgaaatattttaaaatgcttcaaatttatcaaaatgggaggttgataaaatggctcttgatgaaataaaagcattgcatgaaaaacatacaggtgtcttgagtattcacggtgaattacccgtaacgaatcgtactgatttgggaaaagcatatacaccgggggtcgcggggttaagtaagttaatccaacaaaatccagcgcttgcccgtcaatatacgattagcggcaaactagttgccattatcactgatggctccgcagtattgggtttaggcgatatcggtccacaaggtggcctaccagtcgttgagggaaaggcgcttttgtataaagagttagccggagtcgatgcgattccacttgcgctagaacaaacgagtgttccagaattcgttcaaacggttaaaaatatgagtaaaagttttgccggtattcatctggaagatatcaaagcgcctagatgttttgaaatcgaagatcaattgaatgaagtgcttgatatcccagtatatcatgatgatcaagaaggaactgcaattgttgtgttagcaggtttaatcaacgctgcgaaagtggttggtaaatcgttaacggatttgaaagtggttttgacgggtgctggtgcttcgggtttagcaaccgctaaattgttagcgagcgttgggattcaacacattacattggttgatcaaaaaggggtcattcgtgatcaacaaaccagtttgaatgattatcaattaaaatttgttcaagcggttcaaccagaaacagatgcaacaacgttagcggaagctttagtcgatcaagatgtgttaatcgggttatccgttggggagcttgtaacggctgagatggttcaatcaatggcgacagatccaattatcttcgcattagccaacccagtacctgaaattgatccagaattggccaaaaaagcaggtgctgctgtgattgcaactgggagttcggcctatcctaaccaagtgaataatatcttggcgttcccagggttattcaaaggtttattggaaaatcacattacacattttgaaacagcaatggaaggcgaaattgccaaagcattagcgaatatgattcaagcaccaacgaatgaaaaaattgtcccaggggtttttgaccaaggtgttgtcaatacggttgtagaagcagtaaagcagtataaataatgatttagaatggggtttttagtgatggaagcaaaaaaaactatcaacaatcagaatttatttcagaaatttattgcattacacattgggattatcccaatgccgctatatttaatactagcgcttggttacattctattaacaatgaataaccagatgcctaacgatatgttaggtgcgctaggggtcatgacattattctcatttattcttgaagaaattgggaaacacattccagtcttgaaatcattgggtggtaaggtattagtcgttacattcttaccctcatacctcgtttatcaaaactggttacctaaaagtaccgtgcacgttgtcacagattttatgacacgaaataatttcttagctttctttattgccctattaatcgttggtagtattagcgcgatgaaccggaaaacattaatcaaggcaagtactagaattatcgttgtcttattgatttgtgaattagttgggccacttttgggcatcgcagtcggaacgttattaggtctttctgcatggaagagttatttttacgttgttgcaccgattatggccggtggtgtcggtgaaggggcactgccattatcactgggttacgcagcaattatttcgatgacgcaacctaagatttttgcgatgattctaccttgcgtcatgttagggagtttggttgccgttatcttagccggtattttgaaaaaaatcggtgacgttcatcctgaattaacggggaatgggcgtttagtagatactgatgaagctgaatcaggacttgataacttaacacaaaaaacaagcggcgctgatatcgaaaaaatgttagtatcaggtattttagcagttgccctttacctattaggagtgtgggtcaatagcgtgattcatttacccgcaccaatcgtgttattaattgtcgtgatggctgctaaaatgttaggctggattcctgaaagtttacaagctggtgggagttcattatatagtttaacggtaaagggaattacaccgccactcttgtttggggtcggggttgcaatgacgccttggaattcattgattacggtctttacgaatgtcccaatgttaattacgattgttgtgactgtcacagggatcgtaacggcagctttcttcagtgcaaaacttttaggcatgtatccagtagatacggcaattgcggtttcgtgttgtagcggacaaggtgggaccggtgccttagcgattttagcagcgggcgatcgaatggttcttatgccatttgcacaagttgctgttcgactaggtggtgcgattacggttaccctttctattttcttaatgcgcctattcgcttagaaggagtgccacatggattattctcaacaaacaagacagcttaatttgaaagaaactcattattatcaacaatgggtcacgttactgacacaagaggggattgaagggttaccccaaaccgtgaatgatgtagaggcgtgctttggtatttttgaagggcagcagctcattgcgacgggggcctatcagaaaaatgtgctaaagtacattgcggtcgatcatcattatcaagatggcaagttatttaatgccattatttcgacattaattagcgcgttggcgcaaaaaggtatttttcacatctttgtgtttacgaaaccaaaatatcgacaaagctttgaatttgtcgggtttaatttattggcggaaactgacgtcgctgttttgctagaaacgggtgatgtttcgctacaacaatttattgcacaggtaccaagaccaagggttcaaaaacaaacgcaagccgcaattagtgcgattgttatgaatgccaatccattcacattagggcaccgctatttagtggagcaggcggcaaaggcgagtgatttcgtttatgtttttgtggttagtcaagatgtctcgctgtttacaaccgccgaacgcttcaaactcgttcaacaaggggtcgcggatttaacgaatgtggtggtagtcccaacaagcgactatatggttagttatgcgaccttccctgcttactttttaccagaatcacaagatgtgattggatatcaaaccgccttggatgcccaattatttaaaaaaattgcggcacagttaaacattcaatatcgctttttaggggaagaaccattttccaaaacaacggcattatacaatcaagcattggcgactaatttgccacctgaagtgactgttaaggtgattccaagacgacaggcggcagaccaggttatctctgccacgcgggttagacaagccgttcaagcgggcatgattgaaaccgttcaaaattttgtaccagatacaacttaccaatttattaagcaaaaccaggctagtttacaagccagaattcagaaagggatgcaagttgatggaaattaaacatactgcaattgcaggaacgttagagtcgagtgatattcaaatcatgctttctaaggttgaaggtgcaactgaaatcgaattagaaagtgctgttgaaaaacaatttggagctcaaattcggactttaatgcaaaccatcttagatcaatacggcattacaaatgtcaaaattaaggctgtcgacaaaggcgcgctagattgcaccattaaagcgcgactaatcacggtgattcaacgggcaactgataaagaaaatgatccagattgggaggtgcttggctaatggaacgtttgcgacggacgatgatgtttgtgccaggtaataaccctggaatgttaaaggatgccggtatttacggtgctgattcagtcatgtttgatttagaagattcagtttcacttaccgaaaaagatgcggctagaatgctagtaatgcaggctttacaaacggttgattacggtgaaacagaattagtcgtacggattaatgggttagaaacaccttttgggcgccctgatatctttgcaatggtcaaggctggcgtcgatgtgattcggctacccaagacggaaacggttgacgatgttattgaaaccgaagccgttattgctgaagccgagcattattttaagattccggctaaaacaactaaaatgatggcagccattgaaagtgccgaaggggtcttgaatgcgccagcgattgccaaagcttcagatcgattaattgggattgcaattggtgccgaagattatgtgacaaacatgaagacgcatcgttatcctgatggcgcagaactttcatttgcacggaatatgattcttcatggtgcacgagcagccggcattgcggcgtttgatacagtttactcggatgttgataacgaagcgggctttaatcacgaagttgagttgattcacgaacttggttttgacggcaaatcagttattaatccacgccaaattccgttagtgaatgccatttatgccccaactgaaaaagatgttcaaaatgcaaaagacgttttaaacgccattgaagaagcacggattaagggctctggcgttatttcattaaatgggaaaatggttgataaaccaattgtggcgcgtgcgcaacggaccatgatgttggcggaagcatcacatttagttgatcaggagggaaattggtatgctgaataaagtacaacgcgaattaccagatgatttaatgcaaacaatggcttaccaaccatttgaaacggttgaaatcggtcatcctgaaattcaacgtgtcgcccctaaggtaacagctgatcagggacacgcgaaattagtttcatcgattgaagatgtgattcaaaaagtgggtctaaaaaatgggatgaccatttcattccatcatcatttccgtgaaggagactatgtttttaacgcggtcatgcaaattttgattgaccaaggttttaaagacttaacgttagccccaagttcactgactaacgtgatgaacaagatggttgttaaagcaatcaaggctggtgtggtgacccatattacttcttctgggatgcgtggcgaattaggggatttagtctcacacggtggattagaaaacccagttattttacgctcacatgggaaccgtgcacgggccatcgaaagtggtgatatcaagattgatgttgcgttcttaggtgttcctaatgctgatgaagtcggtaatgcgaacgcgattaaaggtgacgctgtcttcggctcactcggctatgcattgatggatgcacaatatgcagataaggttgttttgttaacggatacgattatgccatatcccaatacaccagccagcatcaagcaaacgcaagttgattatgttgtaaaagttgatcaagttggggaccctgaaaaaattggttcaggtgcaactcgctttaccaaggatcctaaggaattgaaaattgcagaaatggtgaatgccgttattacacactcaccttacttcaaacaaggtttctcattccaaacaggttcaggtggcgctgcattagctgttacgcgttatttgcgcgaatcaatgttgaagaagtccattaccgcttcattcgctttaggcgggattacgaagccaactgttgatttactcaacgaaggcttagtggataaaatcttagacgtgcaggattttgataaagacgcggccgatagtatggcaaccactgaaaatcaacaagaaattgatgcttcttggtatgcagatccttataataaaggggctgcggtcaaccaattagatgtctgcatcttgtcagcacttgaaattgatacgaagtttaacgtgaacgttatgactggttcagatggcgttttacgaggggcaatcggtggccatcaagacgcggccaatgcgaagttaacaattatttctgcaccaattgtcagaggacgaattgcaacgattgttgatgatgtgacaaccgttgttacgccaggtgattcaatcgatgtcttggtcactgaattagggattgcgattaaccccaaacgccatgatttgattgaagcattaagcaatattccatgcgtaccagtgttcacgatcgatgaattacggcaaaaagccgctaaaattgttggacaagcaacaccattagccttcaccgataagccagttgctttggttgagtatcgtgatggcactttaatggacgttgtgtatcaagtaaaggactagtcggatgattaatctgtttgcaactggcacaccacaagagattaatgcggtcctagccaatcgtgatcagcgtgcggctttacaaaataaattggtgcgttcgacgtcatccgataaaagtgtcgtgacactcaagctcaatattcctggtcccattaagaataatgcggcactgacgcagctgtttaagacaggctttgccacttttaaacaagcattaacaattcaacggcaaattgattgggatcagccaacaggtcccgaagcgtttttggtggttgatggctcaccagaaaagattaagcaacgcgctgttatttttgaagaccagcatccattaggccggttatttgacgtcgatgtgctaacttggcaagctgatttgcaacaagcacaacctgtgagtcggcaagattttggacagccagcacgccgatgcttgttatgtgatcagccggcaaaggtttgtgcaagaagtcgacgccatacagtggcagaactacaagctgcaattaaccaacattatcaattattgatggagacgaattagatgaaaacatcccaagcaatcgcgcagcttgcgcaacgtgcactattgtatgaagtgagctgctatcccaaacctggtttagtggatcccatcgatcatcaaacgcacaccgatatggatctgttcacgtttatcgatagtagtgtcgcgttactaccgttttttgaacaatttgttcaggtgggtagtacgtttgagcaatcggatttaacagcactaatggctcaaattcggccgcttggtatgcgagcggaagacgcgatgttgtcagcaaccaaaggtgtgaatacgcataaaggggcgatattctcactaggaattttgttgagtgcgacggggtatctactgcaaaaatcaacattgacaccactgaaattaagtcaaacagttcaagccatgttggcgggattggttgagaatgatttcaaggcccttagtcaaaaggaaccggcgtggctaacaaatggtgagaaactctacctgcaatacggattagttgggatccgtggcgaagcacaggcggggtatccaaccatatttgaaacagcgtacccttacttaaagacacagacgggtgattggaatacgcggttagtgaacacactaataaaaatcattagtgtttcagaagattcaaaccttgttaagcgtagcggcagtttacaaaccttgagagatgttcaaaagcaagcggcagcgattattgctgctggtgggatcgaaactgaaacgggtcagcaaggattaacgaaattagatcacgaagcaacgcggggccattacagtttaggtggcagtgcagatcttctaatcatttcggtttatattgatttgttatttcaataggcaataagaaaaagcgtccgacaatttcttgtcagacgcttttttgaatgaatgattaagctgttttggcttttggttcgcgtcccaaaatcacttgggcgataattaagacgacataggcgattaaaacgccacctagtagactgttggttgcggttgctttaaccaaccagtattcttgccaagcgtgattgttgaagacccaccagaataatagcccgaataataaggttaaggtgtttaaaatggcgaagaaccaaagattaccattttccttgttctttaaatagacgattgagaagattaagttccagagtccccaaccaattaatgcgaatataacgccccaatagataattgttgctgccatcatacaacctccgtagaaatttcaatttaagttatgaaaaagcttacacttctattttagcatgattttttgtttataccagtgaaaagataatttatgcacaaacttctagttaaatcgcgcaataaaacgttgactaagcccgttaaaatcggtactctaatagttaggtcaaactaagtctaggaggcgtcaaatggaactcgcacaaaacgcacgcatgaattcgttgttcgaattttatggcgcacttttaacggcaaaacaacatagttatatctcattatattatggggatgatttttctctcggcgaaattgctgctgaatacaaggttagtcggcaagcggtctatgacaacattcgtcggactgagaaaatcttagagggttacgaagaaaagctgcatctctatcgtaattacgaacagcaaaatgccagtgcagatacgctacaaaagtatattcaagcgcactatccagacgatcaagaactgatgcgcttgttggctgacttactgaatttaaccgaacaataattaacttaaaggactgataaaaaatggcatttgaagggctaacagaacgactacaaggcgcattgagtaagcttcggcgtaaagggaagattaccgaaacagacgtcaatcaagcgatgcgcgagattcggctggcattattagaagccgacgttaactttaaagtggttaaagactttattaaagtcgtcaaggaacgcgccatcggggcagaagtccttgatagcttatcacctgcacaacaaattgtaaaaatcgttgatgaagaattaacgaagatgatgggtgaaacggctgtgccgttgaataaatcaccacatattccaacaatcattatgatggttgggttacaaggggccgggaaaacaaccacggccgggaaattagcaaaatatttaatccaaaatgaaaaagcacggccattgatgattgctgccgatgtttatcggccagctgcgattgaacaattgaagaccgtcggcaagcaagttgacgcacaagtctttgaaatggggacggatgtcaacccagttgaaatcgttcgtcaagggttagcacaagcggccttacaaaagaacgattacgtcttaattgatacggctggtcgtttacaaattgacgaagccttgatgcaagaattggctgatattaatgagctagcccatccaaatgaaatcctcttaacggtcgatgccatgactgggcaagccgctgtcgatgttgctgaaggctttaacagtcgtttagatgtcaccggggtcgtcctaaccaagttagatggcgatacacgtggtggggcagccctttcaattcgcgccgtcactggcaaaccaattaagttcactggtcaaggcgaaaaacttgatcaactcgacattttctatccagaccggatgagtagccgaatccttgggatgggtgacatgttgagcttgattgaaaaagcgcaacaagattatgacgagcaaaaagcagctgatatggctgaaaagatcaaagaaaatagctttgattttaacgatttcttggatcagatggatcaattgcagagcatgggacctttggaagatatcatgaagatgattccagggatggctaataacccacaactcaagaacatcaagatggatccgaaagacatggcgcatatgaaggccatcgttcaatcaatgacgccacaagaacgggaaaatcctgacttattgaatcctagtcgccgtcgtcgtttagcggctggtgctggtcgcccaatcgttgaagttaaccggatgatcaaacaattcaatcaatcgaaaaagatgatgaaccaaatgtcaaagggcaactttaacggcatggaaggtttaatgggcaacggtatcaagggtaaaatgggtaagatggccatgaattcaatgatgaaaaaacaaaagaaaaacaagaagaaacgtctcaaaaacgcgcgtcgttttaaatcttaaaaaaatttgtcctgtaaagaaaaaacactttacacggcgtttgaaatttggtatattatgacatgttaaagaattaataggaggtggcattaatgtcagttaaaattcgtatgaaacgtatgggttcaaagaaacgcccattctaccgtatcgttgttgcagattcacgttcaccacgtgatggtcgctttatccaacaagtaggttactacaatccattaacagaaccagttgacttgaagttagaagaagaagttatcatggattggttacaaaaaggcgcacaaccttctgatactgttcgtaatcttttatcaaaacaagggattatgcaaaaatatcacgaagcacgcttcgctaaaaagtagggattcgttatgacagacgtgaaggaactaattattgcaattgttcagccacttgtcgaacatccggaagacgtcaaattgactgaacatgagacagaacgttttatggaatttgacttacaggttaatccaagtgatatcggtcgcgtcattggcaagcagggacgggttgcacagtccatccgtaccattgtctatagtgtgaaagcaccataccaaaaacggatccgtttaaatattgtagatgcctaacaaaaacgtttaaatgaagcagagatgttttatttaggcgttttttgtcgattaaggagaaattaaatgccagaaaaatactatcaagttggtaaaattgtcaatacccacggcatccgtggtgaagtgcgggtcattgcgacgactgactttacggattcacgatttaaaaaaggcgtgcaactggccgtcgaaatgcccaatggccttgttgatgttaaagtggcggcaatgcgccaacacaagcaattctatctattacagttcgaaggaatgggcaatatcaacgatgttgaacagttcaagggtcataatttaaagattgctgcaagtcaacgtgaagatgatctggaagatgatgagttttactacggtgatattatcggcttagaagtggttgaagaagccgatgggaccagctatgggaaagtctcagaaatcatcgatccaggtcccaacgatgtctgggtaatcaagcgccgtggccgttcagacttactcttaccatttttgaagtcagtcgttaagaaaattgatattgaagcgggtaaagcctacgttgaagtaccagaaggattgattgataatgaagattgatgtcttaagtttatttccagatatggttcaaaatgggttatcccaatcaattatcggtaaggcaattgatcgtgacttaattgatttagaagtgacggatttccgtgatttttcagtcaataaacacaattcggttgatgatgcgccgtatggtggaggtgcggggatgttgctccgaccacaaccgatttttgaggcgatggatcaagtgaatgccaagaatccggggcacaaacgggttattttgctcgatccagctggggtaacgtttaaccaaaaagttgccgaagaatttgctcaagaagaccacttggtttttatctgtgggcattacgaaggctatgatgaacggattcgcacgctagtcactgatgaagtctcattgggcgatttcgtcgtcactggaggcgaattaggcgcaatggtgatgatcgatgccatttcgcggcttgtacctggcgtcttggggaatgaacaatcagcggttacggattctttttcgaccggcttattggaacatccacaatatacgcgaccaccggaataccgcggtttaaaggtacctgaagtcttgatgaacgggaatcataagctcattaacgagtggcgcgagaagatgtccttgaaacggacatatgaacggcgtccggacttactagagaagatgacgttgaccaaggatcagttgcactggttacaagaaattaagcaagaagcggctgaaaaataaggcttttattctcagttgaattatgctaaaattaaaaattgtgatgattagtcacaaaacaacggtattccgctggcgcaagacgttaatgaatatctgtggaaaaaggagagattcaaaatgaatccattaattcaagaaattactaagtctcaattacgttcagatattcctgacttccgtcctggggacaacgtacgtgttcacgtgcgtgttgtcgaaggtactcgcgaacgtatccaattattcgaaggtgttgttatcaaacgtcatggtgttggcgtgagtgaaacttacacagttcgtaaaatcagtagcggtgtgggtgtggaaagaactttcccattacactcaccacgtgttgctcaaatcgaagttactcgtcatggccgtgtacgtcgtgctaagttatactacttacgcgcattacgtggtaaggcagctcgtatcaaagaagctcgtcgttaagatgacattaaaaaaggccgactcattacgagttggtctttctttatgtggattacaaagttaggtgatgacagatgaatcaatggatctacgttgttttatatcaagcaaacccactttattatgataaaagtaaaatgatccgggcgtttagttcggaacaacgggcccaagaatatgtggcgttgctcaatgagacgccatatgcgaatcaatcactaaaagagggccattatacttatcaaaagttgaacttaaactaatctaataaatgccacttataaggcgcaatctgatgcttctgcggagtatgggattgtgcctttttgggttgtggcactttcttgagggtcattaggagtgcaagtagtggttctaataatagaataaagacggtaaatccaagaaatccagctacggcgtagaatgcttcaggcgcaagtgtgagttgattaaagaaccgttcgcagcggtggttgaaggcgtttaatttttgttcactgccatcacgatcgactgcgtggtggacctttggatgccgacaaacttcaaagcggattggatttttttgatgattactagaaaagcgcatgcctttgccgaagaagtaagggcttacaaaaggcagtaaacaaagtaccaataaagatagaatcgcagttagtcgtttcattactagaacctcttttgtcttaatttcaaactaattataccataaattaaatgggttagcgcataaaaaaatagccctccgacgaggactaagcaggtgttcgataatggaaatgatagactttaaatgaaatgatcaagctaaccactaacaagaaaagggcaactagtaataaattagggactaaaatcaagatgatgtaagcgacgattgcacataagtatgccagtaaaatcaaattctgatcgagtgataataaataagcaacaatatgcaaaataatagcaataatgcacaaccaccatactttcgccatggcatccatataagtggggatgaatttcgtaacgtgggggttaaccactagaatgatcaaagattgtaaaaccgttacaactaagaaaattaagttgaataaaaacggtagtttgcgataagaaatcttcatattaataaacctctatcatttaagattctttaagtataacgaatttttttataaaaagaaatatgattcaataaatttaataattggtcaattaacggggaaaattgcgttattagcttcggattgatacaatcaggttaatttaaaacgagtaggtgatttgatgaatagtatccatttaatttgtttaggtgttcaggatttaaccgtgtcacgtcagttttaccaagcactcggctttcaagcgccgaatttagaaaatgctgagacaatcgtctttttcaataatactgggaccaagttggaattgtttccgtacactgcactactagccgatattggcttatccgcagataatcatccatttccaagaacgttcaacggcgtgatccatgcctttaatacgcatagtcaagcggaagtcgatgcaacatttaaaacagctctcgctaacggggccacgctcatcaaagcgccagaatggggcgagtggggtggctatagtggttatttcagtgatcccgatggttactattgggaagtcgcttactcaaaggactggcaatttgatcaagatgggatggtggtgatcgaatagaatgtgggcgcacgtaggtttttttgtgttttacgctgttcagttctttagaagtctgttataatgaataacgttctggagagttggcagagtggtaatgcaacggactcgaaatccgtcgaaccggcttataccggcgcgcaggttcaaatcctgtactctccttactataatggaaaaagcaaaacagttattgttttgctttttttttggtattttttaacagtttccccttattataggataagttacttagttttatttgttgaaatatgatattattaaccttaaggggatgagttaatgacagataaacattattacggcaactacgaagtggttgaagaacgggaatcgcaaaaatatgttgcaacgattaaaatacataatatggttaaaaaagtcgtgatgcaagatgatgctctgcaaatgctcgcacaaaatgatgttttacccgaaacggtggttcataatattattaaagaaccaaatttgctgaaggaacaagtcatcatttctggtgctaatttggcccaatacttagattaaactcaaaaataagaggggctagaacaagtgaattgttctagcccctcttatcatatttttaggcttcactgatgtcagcaaaggtggcttcagtgacccgctgtaagtcttgcggattaatctgaattgagcggccaattttaccggatgagacatagatgaatggttccttttcagcctgttggtcaatgtaaatcggatagtgggattgttcccagattccaacgggcgtgttagcgccatgttcgtagccagtagtggccacgagctcccttaatgggaccatcgcaatttttttgttgccagaaatttggcttaattttttttcgtctaaatgacaatcaatcgggacgacaccgacgattgggccggtactcttaccagagagcaccaatgttttataaataagatgttcatcgatatcgagatgatcgaccttcatttgggcaacgttgtggacttcctctgttgggaattcaagttgggtgtaggccactttttgtttatctagaattttttcaactaatgttttggataatgcgttttgctttttcttctttcccataatagactcctttaatgaatagtgttagtttacggcaatttggtttaaaagtaaatttaagactgcaatgataacgtttcgttgtataataaaattacataaggagtgatgatatgttgtggtttaaaaaacaaacagaaaaggacttacagtcccacgattttacccagttggtgaagcatgcgcgtaacgatgaaatgcattaccaaaagattcaagcgacatttgctggcttgaaaaaggcatatcaccaaccaaaatcgaatcaattaccaaaaaaagactaagttcgcgttgttggtgacagtatggcatactatatgtaataaataacgggtgggtgacacgatgaaacgacaaacttggcatttcctcttttataaatcagccttcacaaaagaacagattgaccagttattggcttatttaaaacaacaacaaaattttggtgggtttccgattgttgaattaattggtgatggcgatagtagtgatattcggtttgtcacgatggtttttgatccgttggccccgattgaagcccatctacaatcagaaatggctaagtttatgttgatgcatgccattcgcccagatggcaacacgccagaagctgatatgcggctatatggtcgtgtgatggcagaatctgatgcagcactcggaattgagttccaacgttatgacgatcagagtatggacgttatttattggggtcagaaccaagcagcacattaagtagaattacgattgaaagtctgggacattttgttctgggcttttttgaatgattgctttagattcaagtcataatcaggtatgatgttaatacgttcaactttaaaattgacttaaataacgactaattaaaaggatatggtgaatacagtggctgaaatggatatgttagcatttttcgatgcagaattagatgatttacaatttagtggggatatgaatatcaactgggacaaacaagctcgggcgattgaattggaattcacattaaacgtgactaaggaacaagcaattgccgttgaagatcaaaatggtgaattgaacgaatcggatgaaatcagttatgaagatgcgattttattcttcgatgaaagtaagatggacggctttgaatatgcagacaattatttagcagtgattccatttgctggtcgcaaggggttaaacgcacaagtcggtcggggctttttcaactatttacaagacttattagatgaaggcgaagatcaattagccgcttttgtgaatgatgaatcagacgaagaaacctttatcttaaactgggatgacactgttttccaagcaactgtcgctcaagcagatgatcaattagcgaaaaaatactacgcttaccctaaatactaagcaacccgcattaagaaggagacatgctacatggaatggacaaaagtaacggtcgctactgttaatgaagcagtggaagcaatcgccaatattttaacggaaaatggtgcggaaggaatccaaatcgaagacgcagctgattatgaacatttaaaggcaaagccagatcaaattattgatctagacagtattccccaccttgaaacgggtgctgcagtgagtgcctttttcccagaaacagtttttgtgccggaaaaattaccgttgattgaacaacgcgttgcccaattgactgactttgggttagcgattggttctggtaaggtgacattggcacaagtcgccgatgatgattgggcgacagcttggaagaaatattatcaaccaacgcggctaactcgcttcttaacggttgtgccaagttggaccgactatcaaccgactgatgaacgcgaagcactgattcggatggacccggggatggcttttggaacaggaacgcatccaacaacccatctatccgtgcaaatgttagaaatggttctacgcggcggtgaatctttaattgacgtcgggactggctctggggttttgagtattgcggctgcgcatttaggggtcaatgatattcgcgcctatgatgtggatcaagttgcggttgatgccgctaaggaaaattttgccctcaacccagtgactgctggcattgatgcccatcccaacgatttgttgaacgggattacaacgaaagcggatgtgattgtggccaatatcttagcagagattatcgtgcccttgattccccaagccaaggctttattgaatgacaatggacacctattactggccggcattattgcagataaagaagcacttgtccgtgaaacgttatcggcgaatgattttgttgttcaagaagcccttcatatgggtgactgggtggcattgattacacgccaaaagacggacgacgattaagaggagtatggcatgcaacgttattttattgatgaagcaattcaagtagaacaacaagtgaccttaacgggtgaaactgcacatcatatgctaaaagtgatgcggatgcagcctggtcatcgtgttgaattggtaacgccggatgaacaagcattcatcggtgaattaactgaactggatgcaactgacaaaacagtcaccgttacggtgcaatcgccaattacaaaatcagttgaattaccgattgagacgacgattgtatgcggcttgtcaaagggtgacaaaacagactggattgttcaaaaaggcacgcagttgggtgcacaccggtttattttctgtaatagccaattctcagtcgcacgctgggatgataaaaaacaagctaagaaagttgcgcggcttcaaaaaattgcgcaagaagcagccgaacaagctcaccggacgcatgtaccaactattgaatggcgcaacagtttaacggcggtcgcacaagaatcagcgacgattaaattagtggcttacgaagagtcagctaaagacggtgagcatgcccaattagttcagagcttacaaacagcccaacctggggatcgattactttgtgtttttggtccagaaggcggcgttgcgcccaaggaaattgagatgcttgcggcggctggctttaagatggctggtttaggaccacggattttacgggccgagaccgcgccgttatatctgttaagtgcgatttcgtatgtgacagaattggctactttatagtatgatagatgtaatctttttacagaggggcacaacatgactaaatttatgaataatcgttatttaaaaatggattgggtacgctatttattagtggccattctcttggcggtcgttttaccgctagtgtttggtgtcttgcacatcgataaaacgtggcggattggactgctattcatggctgtcaatggttgcgcagcctttatgattgggtatcgtgttcaaaagacccatgcagcttggtatcacattttgtacctgccgattttatttggattgatggtggttgtgcgctacgcagattataactattggttcgttcctatttattgtttattaagttacttaggaattaatactgcgtatgaacgccgttaagcaaactgactcgacagttaattagttgagtcagttttgttgtattcagtacatttttaatcgagtaagaggaattggagtgaggcaggatgccagaagaaaaagtaatttcacagcaggaagtgctacagttatgtcagaaatacatgaatactgagcatcttgcttttgtccaaaaagcgtatgattttgcagcttatgtgcataaagaacaagttcgccaatcaggtgaaccgtatattattcatccaattcaagttgcagggattcttgctgaattgaagatggatcccgcaacggttgcttctggttacttacacgatgttgtcgaagatacgaatatcacgttaggtgatgttgaagagatgtttggcaaagatgttgcggtaatcgttgatggtgtcacgaaattaggaaaaattaaatataaatcacaccaagaacaactggctgaaaatcaccggaagatgttattagcaatggctaaagacttgcgggtgattatggtcaaactcgccgatcgcttgcataatatgcggacgttgaaacatttgaaacccgaaaaacaacgccgaattgctaacgaaacattagaaatctatgcaccattggctgaccggttagggattagtaagattaagtgggaattggaagatatttcgctccgttatttgaacccacaacagtactatcggattgtgcacctgatgaattctaagcggacacaacgcgaatcttatattcaagaagcaattgaagacattaaagactcaattgctgatttagatatgaattacgacatttatggacgaccaaagcatctttactcgatttatcgcaagatgcgcgaccagcataaacaatttgaagaattgtatgatttactcgcaattcgggttgttgttgactcaatcaaggactgctatgctgttttaggagcaatccatactaagtggaaaccgatgcccggtcggtttaaagactacattgcaatgccaaaggccaacatgtatcaatcgatccatacaactgtgattggtcccaaaggcaaaccgcttgaagtgcaaattcggacgcaagaaatgcacgatgttgctgaatatggggtcgctgcacattgggcgtataaagaaggcgttaaggaacagattaagctggatgaatcagggcgtaaactcgatttattccgtgaaattcttgaaattcaagatgcttccgatgatgctgcagaatttatggaaagcgtcaaaggcgatatctttagcgatcgcgtttatgttttcacacccagaggcgatgtttatgaactaccaaagggttcagtgccactggattttgcttatttagtgcatactgaagtcgggaaccacgctgttggagctaagattaacggcaaaattgtaccgttgaactatcaattacgtaatggtgatattgtcgagatgttgacgtcaacaagtgcgacaccaagtcgtgattggattaagctcgctttcaccgcgcgtgctcggaataaggttaagcgctactttaaaaaagaagatcgggatgaaaacgtcgaaaaaggacggacggctgttgaacatctgttggtagaagatggttatacaccaaaagaacacctcactaaagccgagatagctgtcatcctaccacattttaattttaatgccgaagaagaactgtttgcagcaattgggttcggtgaaatctcaccacagtcagtcgtcaatcgcttaacgattaaagaacgacgggcaaaagaagaaagtgaacaaaaagcattagaagctgagattctatcagcgaaggattcacaacaaccagggcctaaagcaaatggtagccatatcacaatcaaacatgaagacggtgttgttattgaaggtgtcgacaatgtcttagtgcacttgagtaaatgctgtaatccagtccctggtgatgatatcgttggctatgtaacaaagggacgtggggtttctgttcatcggcgcgattgtccgaatatcgttgatcgggcagatatgaacagtcgattgactgaagtcagttgggaaaataccaacgctaagaatgatcaactctatgatgcgaatttggaaatctacggctataaccgtggtggactattgaacgatgtcttacagtccttaaatgcacatacgaaacagctaaataacgtgatggggcggattgatcacgataagatggcggatattcatgtgacagtcggcattcgcaatacagatcatttagaaacgattatggaagccgtgaagaacatcccagatgtttacgaagtcaaacgggttcaaggataggagcgacttaatatgcgagtagtattacagcgagtgagccaagcaagtgtcacgattgatcagacgattgttggcaagattaaccaaggctttttgttattggtcggtatttgtgatgatgatactgaagctgatttagattacttggttaagaaaattagtcaattgcgcgtttttgaagacccagatggcaagatgaatttggcgttggcccaggttgacggtgccattttatcggtgtcacaattcaccctttttgctagcactaagaagggcaatcgcccaagctttactgcggctgggaaaccggactatgctaaacgcttatacgaacagtttaatcaaaaattagcagcgactgggattcgcgtcgcaactggagaatttggagccgatatgcaggtagctttggtcaatgacggtccagtcactatcctatttgatacaaaggagaatggataattaatgagttatcaaaatgcgatttgggatttcgatggtacattgtatgatacttatcctgttatgatgacggcgctcagtcaggtttaccgtgatcatcaagtcgcagtcgatcaatcgcacttataccaagcgattaagcagacttcaattaaacgggaactgcagatgcttgctcagcaaactaatgtttcatttgaacaattggatcgagaatatcatgaattagaacaccaattacaacagacgccacaaccttatccgggggcagcggcgattttgaaacagattagtgcacatggtcagaatttcttattgacccatcgtgatgatgctgcagaaaaatttttggcagcgcatggactagcggattattttactgaaattgttacgagtcagagcggatttgccaggaaaccggcgccagatagtttgaacgatttatgtgatcgttatcagctggataaaactaaaaccgtgatgattggtgatcgtgcattagatattgaagcagggattaacgcccatgtggcgacggcctatttcgatgttgatcgattgccaatcatggtgcaaccgacaatcacaattacgcaattaagcgcgttagggaaatattttttaaactaagaaaagcggtgtcgacaaattgaaagagtcgacaccgcttttttggtttaaaggagtgtgatgattagaaaggataggtaccatgctgtggccatcacgaggacaaagcgccaccaactccgtagaaacttacgtaggtacagcgcacggtcgtagtaaaagcgcgttaagctccagatgattccccacagacagatagctaagcaaaagaaccagccagctttactgaaaattggcatactcagaaagatagcacttactagcaatggaattggtagccaattaatataatgaaaacgatgtttaaatagacgctgagtcaaccggtcgatacagtagccgagtgcgacacagacgggcggtaagcctgcaaagaaaagtgttgtgctaaatggcatttaaatcacctcgaaagttaatagtcccattgtaccgtcttttggaaaagataaaaaggactgagttgcactttcaagtgattcggtgtaaactgctgataagaaaaaagtctaggtggtggaataattgaagaaacaaacaagcacgtttagtcgcattactaaaattttcgtttgggtaatgttaatcgccacagtgggctcagtcatttttggttcactcgctgcaactggcattttaaacttctaaaaattagattaaagtgagcaattttttgcggcgttgcttagaagtggtgcgacagcccaaaataagcttacttaattaacaagtgaaacggccatttcggttaacgaaatggctgttttttttggtcaaaaaggctagtaatataaatatcgtgtacaattggttccaaaatgataagattttggttttttttggcaaaatgtggtagaaagtgggggattgtggtagactaaaatcagttaaggtgggcaaaggggtgaatggttatgttcatgggcgaatttcatcacacgattgatacgaaaggtcggttaatcatgccggctaaatttcgtgaatcattaggtgcggaatttgtactcacccgtggcatggacaattgtatttttggttacccccttagtgaatgggaacagttggaagagaagttaaaaaaactgcccctcgctaaaaaagatgcccgcgcgttcgtccgctttttctactcagcggcggtcgaatgttcccctgataagcaaggtcgggtgaatatcccagacacacttgctaaacatgctggtcttgaaaaagaatgtgtgttaatcggggtctcaaaccgcattgaaatttggagccaggaaaaatgggcgagctttagcgaagaagctgaagagaattttgatgatattgcagaaaatatgttagattttgatttttagaaggatggtaaatagatgacagaaacatttaaacatcaaagtgttttattgaaagaaacggttgatgccttgaatgtgcaacccgatggcgtgtatgtagacgcaacattagggggcggcggccatagtgaatatttgttatctcagctgacgaccggtcatctttattcgtttgaccaagacgatcatgccttagcaagtagtaaacaacgattagccaaatatgctgaagcgggccaagtgacttttattaagagtaacttccgctatttaaaagcagcgttagcagaacacggtgtgactaagattgatggtattttatacgatttaggcgtatcatcaccacaatttgatgatgcccaacgcgggtttagttataagaaagaagccccacttgatatgcgaatggaccaaggggcggaactcagtgcctacaatgtcgttaatgagtggacctatcaacaactaattaagatctttttccgctacggcgaagaaaagttctcaaaacaagttgcgcggaagattgaacaacaaagagcagttgcgccgattgaaacgacaatcgaattagctgatttgattaaagaagcaattcctgcaccagcaagacgaaagggtggacatccagcgaagcggattttccaagcgattcggattgcggtcaatgatgaattaggggcaattgaagattcactcgaacaagctattccattggtcaatgtcggcgggcggatcagtgtcattacgttccaatcattagaagatcgtttggtgaagacgatgtttaaggagcaagcaacgctcccagatttaccgaaagggttaccaattttaccagaagaacaaaaaacggttctaaaattagtgaaccgcaagccgattctaccaacagatgatgaattagaagaaaaccatcgtgcacatagcgctaagctacgtgtcgcagaaaaacaaaaagaaattgactagaaggattgatgatgatggcaactaacacggcacgccaattagaaacgccagtagcaccgctaaaaacgcagcctactgcacacaaacaagcagttgcaagccagtctaaaaaagtggctttttcagctgttgaaaaattagcgacgtcagttattggaattatctttttcgcgatgttggttagtttgttaaccaccaaaattgcagttgttaatgcacaacgaggattagaaagtacgactcaaaagatggcccaagtcagcgctaacaataatgatttaaaacaggagatcggtgaattaacaagctctgaccgtctgaatgcttttgcccagaaacatgatcttaaactaaatgaaaataatattcggaacgtgtctaaatgaaatcagttaagacacgtaagagtccacggcggaatcgacgcgtttttggcaggcttttattgctaattatcgcggcgatttttctagttttcgccggtcgttttgcttacattgctgctactgggcatattgcaggggtggatttaacgaaacaatcacagaaaaaatacaaagctgattccgtgattcgcgcacaacgcggtacaatttatgattctttagggaacgttttggcacaagacattaacgcctattcagtgtatgcggtattaagtcacgattacgttggtcctaataagaagccgttatatgtaactgataagaaaaaaacagcgaaagttttgagtcgctatctaccattgagtgaagaaaaaatctataaacaattaacgccagctaaccgttcagtttatcaagttgaattcggaagtgccggccaaaacctttcactgagcatcaaacggaagattgaaaaagaacatttaaccggtatttacttcaatgagtcccctacgcggctgtaccctaatggaacattcgcatctcacgtcattggtatcgctcaatcaccaaaggacgaagacggcgctgatcaaagcctcgttggtgtaatgggaattgaaaaatacttcaacaaacaattagcaggccaagatggttacaagaattttgcccgtgattcctatggatacacgatcaatcaaaagaaaaacaaagtaaaagccgctaaaaacggccaagatatttacttgaccttagattctcggttacaatcatacatggaaactttattaacgagtgtcaataaaaaatataagcctaagagtatgaatgccgtcttgatgaatgctaaaacgggtgaaattttggcggcttcacaacgaccaacctttaatgccagcactaaaaagggaattggcaagatttggcgagatacattagttgaagatggctatgaaccaggctctgttttgaaaattgcaaccttggcagctgccatcgactctggtaattacaatcttaatcagtattatcaatccggttcgattggagttggcgataagaaaattagcgattggcaaacgagtggctgggggatgattccgctgagtcaagcctttgcacgatcaagtaacgttgggatggtcaagcttgaacaagccatgggtcctaaggtttggaaagactacattcagaagtttggcttcttaaaaccaactggtattcaattacccggcgaaacagaggggacattgcaatatgttcggccactagatcaggccacaacttcatttggtcaagggattaacgttaatgtaatgcagatgcttcagatgacaagtgcgattgcgaacgatggcacaatgattaaaccgcagattttatctgggattaatcaggatcatcaagtaaaaccaatcaaagctggtaaaccaattaaggctagcacggccaaatctgtcttacaaaatatggaagatgttgtttatcaagattatgggacgggtcaggtttaccaaattccagattataaagtagccgttaaaaccgggaccgcacaaattactggtccagacggtggctatttaaccggcgcaagcaattatatcttctctgtatcagggattgcaccagctgatgatcctaagtatattttatatatcacaatgaaacagccgcagaatatgacagatagtgctgaaagtattttggcacaggtcttcaatccaatgatgaaacgggcactggagtataccaaaaaggctgaaaaagacacacaacaacaagtaacagttccgtctgtgattggtcaatcaacggatgaagcacaaaagaaattaacggatttaggcctacaaaccgcttctgttggtagtgggaacttagtcgtccagcaattaccaaaggccaatagtgtgattttacctaaacagcgagtcattttaatgaccaatggggcaatgacgatgccagatgtcacgggttggtcgaaaaatgacctcttgaagctcgcgcaattaacaggtgttgagattgacatcaaaggtagcggatatgcttatcatcaaagcctagcggtcaatgggttgctagatggggttaaaaaaataaaagtacaattaaaataagatagttggattaaaggagtttatgaaatggcagcaggacaatttttagtgcccttaatgagtgggtttgtaattacggtgatttttatgccgctttttatcgggtatttacgctttaaaaaagaggggcagacaatccgtgaagaaggccccaaatggcacgctaagaaaaatgggacaccaacaatgggcgggctcttattcattattgccgctgttgtttcaagtatttgggtaggattattcttaaaacagttaacgaatagtctattaattgccatgtttattctggtgttatacggtattctcggtttttcagatgattttattaaagttttccgtaaacagaacttaggcttacgcgcttggcaaaaattgttagggcaaattattggtgggattgtcttcatcgctgtttatttccatgaaggcttcagtactgcacttgaaatcccagtaattggcactatttcaagtaactggttcttttgtatattcgtcttagtgtggttagtcggtttctcaaatgcggtgaacttaacggatggcattgatgggttagttgctggcttggcaaccatctcatttgcaacttatacaattatcgcctttcatcaaaaccaaattgatgtcgccattttcggcctcagcattattggcggattgcttggctttttaatctacaataaaaaaccagcgcaaattttcatgggtgatgttggttcactagcacttggtggcgcactagcagccatgtcaattttattacatcgagagttctcactgctattggtcgggttagtatacgtcattgaaacagcaagtgtgatgttacaagtcggttcatttaagttattccataagcggatttttaaaatgagtcccattcatcatcacttcgaaatgtcagggtggagtgaatggcggattgatatcagcttttggttatttagtatcatctgttcagcaatttatctgttaattttttagaagagggcgaatttaatgaaggccagcacgacgtatcaagatcaggcagttttagttttgggattagggaagagcggctttaatgctgctaaattgttattaaaattaggggcgattgtgaccgtcaatgacggaaaggaacaagaagacaatcctcaagttgcacaattgcgtgaattaggggcaaccgtcattactggatcgcatccattggcgttatttgagcgcaactttgcatacctcttcaaaaatccgggcattcgttacgataacccaatggtggcagaagcgattgcgcgcaagattccagttttaacggaaccagaacttgcatacgaagtgtctgaagcccaatgggtcagtgtgactggttcaaacgggaagacgactaccacaacgttaattacgttgatgttagatgaaaatcgcacccaggggcacgcatacgctgcgggcaatatcggcattccactaagtgcggtcgcccaaaaagtgacggctgccgatgtgatggtcacagaattatcaagtttccaactactcggtacaacaaccgttaaacctaagattgcagttttaacgaatatttatgaagcacatttggattatcatggctcgcgtgcgaattacgtggctgcgaaaatgcgacttgttcaaaaccaaacggctgacgacttttttgttgtcaactgggacttacctgaactacgtgaattgagtcgccaaactaaggcgcaagttgtgccattttcacggctaggcaactctgaagctggcgcctatgtcaaagatggccaactttgttttaagggtgaagtgataatgccagtgactgatattaacgttcctggtgaccacaatattgaaaatgctttggccgcaattgcggcggctaagctgatgggccaatcaaacgatgcgatcattgatgttttaacgacctttaccggcgttaaacaccggatgcagtttgtgacgagctatgaaggtcgccgcttctataacgactctaaagcaaccaatatggaagctaccgaagtcgcgttgaagagttttaaacaaccaattgttttattagcgggtggtcttgaccggggctttactttcgaaccattattaccactactaaaagaacacgtaaaagcaatcatcttatatggtgaaaccaaacaattattggcacagacagcacgcgaagcaggtattcccgtcatcaaaatagttgataatttaacagaagcagtgcctgaagcttatgctgctagtgaagccggcgacgtggttttattgtcgcctgcatgtgcgagctgggatcagttcaagacgtttgaagaacgtggggacgtctttattaaggcagtcgaacaaattacagattaaattggagattctaaaatgagagtaatgatatctggtggcggaactggtggccacatctatccagcgttagccctaattgaaagaatgcaacaacgcgacttgttggatgccgttttatatgttgggactaaacgcggtttggaaagtaaaattgtgccagatcaaggcatcgattttaagacgttagaaatccaaggatttaaacgttcgatgaatatgaagggcattaaaacaaatattaaaacaattcaacttttcttgcgcagtgttaaagaggcaaaagaaatgattaaaacattcaaacctgatattgtgattggaacgggtggctatgtttctggggcattgctgtatgcagcaagtcgcttaaaagtgccaacgttgattcatgaacaaaactcagcagccggggttaccaaccgctttttggcgcgctttgtcgataaagttgccatttcctttgaatcagtcagcgaccaattcccaatgcacaaaattgtattaacaggcaatccgcgggcccaacaagttgctggaatgttaccaaacgaacgtttaagtgaattcgggcttaagactgacagtccgacagtgcttgtgtttggtgggagccgtggtgcaccaagtattaaccaagcttttatcgatgcagtaccagcacttaatacaaaagagtatcaggtgctattcgtttctggacgggttcattttgatgacgttcaagcgcaattaaaggcgatgacgctcaatgataatttggctgttgtaccatatatcaacgacatgcccgaaattttaccagatttaaaggccattgttggtcgtgctggtgcgacgagtttggcggaaatcacagcacttgggattccgtcaattttgattccaagcccctatgtaacaaatgatcatcaaacaaaaaatgccgagagtttggttaaagaagacgcagcgattttaattccagaagcacaattaacgggtgacaaattagtccaatcattagatacgctttttgcaacccctgatagtcaacaagccatggctaaagcagctaagaaaatggggattccagacgcttcagatcgcattattgaagtgattaatactatcatctaagttaagaagggggcggatgacttgaagaaaaaaacaactaaaaatgggtcgctcgatccgctccaattactaaacgtttggcgcgcttatcaactaaagcgttggaagaaacaacgtcggcaacgattaacgcctgggcgaccaacaattagtggtcaactaccacatctaaaagcgcaacgaacggcaaagacaaagtggcggttgacagcgttattgagcaccttcacattgggcgcttgtgtggcaatctattttatgttgccgattagcgacgttcaacaaatgacggtcaacgggactaaatcagtgcctgatcaacaggtgattaatgcgagtggcgtacggattggcgataacgtcctgacacaaatctggcaggaaaaagcgattgagaagcggattcaccagaaactacctaaggtgaaaagcgtaaatgtcaaagttgatcagtttaatcaactgacattggcgattaaggaatatcctacggtgggctatctagtgcggcataaacaatattatccaatcttagaaaatggcacgattttaaagacgaaaatgacgcagtctctcggcaatagccctgtctatagtcaatttaaaaatgacgccttcttaaagcaagggttaaaactatatcaagcttttccaaacagcattcaaagtgctgtgtcggaaattcgtttaacagctaagaacaataatccttatcaagttcacttatatatgaatgatggtaatgaggttgttggggatttgcggacacttgccaagaaaattaaatattatcccacactggcgaaacaaatggacggtaagggacgaattgacttagaagttggcgcttacgccaaattatttgataattctgaggctgattcaataaaaaattagttaacactgtttaaaaagattggattggctttctaaatctagtcgaaatatggtactatttagcataggaatcattttattctaattgaatgcaaggaggttccacacacttaatggagaattcaaaaatatatgtcggtcttgatgtcggaactacttcaattaaggtaattgttgcagaatcaattaataaacaacttaatgtgattggcgtcggatcagctagatcaaacggattaagtcgcgggacgattgtggacattgatcaagcggttaccgctatccaacaagccgtacaacaagcagaacaaaaagcaaatattgaaattaatcgggttgttgctggaattccagccaaccaactacaaatcgaagaatgccaagggatgattgcggtctctgatcaatctaaggaaattactggtcaagatgtgcaagacgttgctagtgccgcattggttcggaatttaccacctgaacgtgaaatcctcaatatcttaccgcaatcgtttacggttgatgggtttgatgggattaaagatccacgcggaatgatgggggttcggcttgagatgaacggaattttgttcaccgcacccaagacaatgattcataatttaaagaaatgtattgaaaaagcgggtttaacactatcacaactcgtagtgaacccattagcacttggtaagctagccttatcagacggggaacaagattttggggcaatcgttgtcgaccttggcggtggtcaaagtacagctgctgtgattcatgatcatcaattaaaatttacggcgattgatcaagaaggtggcgaccatatgaccaaggatatttccgtggtcttgaacacgtcaattgaaaatgctgaaaaagctaaacgagattatggcaatgctgattcattggctgcttcagaagaagaacaaattccaattgaagttgttggtcaagccttaccagtgcaagtgacagagaaaaaattagctgagattattgaagcacggacgatgcagatttttgatcgtttgaaagctgaattggataaagtacacgcttttgatatgcctggtggggtgattatgaccggtggcgtgacagctttacctgggattgtcgacttggctaaggaaatctttaattgcccagtgaagttatacattccagatcaaatgggcttgcggcacccatcatttgcccaagggttgagtttaattaactacatagctaacttgtcggaagttgattggttggtccaaggcgcacttgggaatgtagcacagactgaattagaccaaacagtgacgaaatcaacaatgaaatctcaagcaacaaccaaagaagtaccaagtaagaaaaccaaacctaaaaatcaatcaaaaaatgcattcgaaggcctgaaaaatttctttagtaacttttttgaataagggctagtcgtaacaggaggaaaaacagatggaatattcattagatgcagcacaagaaaatagcggcgcaatcatcaaagtaatcggcgtcggtggtgctggtggtaacgctgtcaacagaatgatcaacgaaggcgttaaaggcgttcattttattgcggctaacactgacgttcaagcacttgaagattcaaaagctgaaacaaagatccaattaggacctaagttgactcgcggcctcggtgccggcgcaactgctgaaatcggccaaaaagctgctgaagagagtgaagaagtcctcaacgaagccttaaaaggcgctgacatgatctttgtcacagccggcatgggtggcggtaccggaactggcgctgcccctgttgttgccaaaattgctaaagatcttggcgcactaacggtgggggttgttactcgtccatttacatttgaaggccctaaacgtggtaaaaacgccgcttcagggattgctgaattaaagcaacatgttgatacaatggtcatcattgctaataaccggttactcgaaattgttgacaagaagacaccaatgatggaagccttcaaagaagccgataatgttttacgtcaaggggttcaagggatttctgacttaattacatcaccagggtttgtcaacttggattttgctgatgttaaaacagttatggctaaccaaggctctgccttgatggggattggttcagcaacgggtgaaaaccggacagctgaagcaacgaagaaggctatttcatcaccattattggaagtttcaatcgatggtgcagaacaagtcctcttaaacatcacgggtggaccagacttgtcattgtttgaagcgcaagatgctgctggtatcgtgcaacaagctgcaactaacgatgttaacttgattttcgggacttcaatcaacgaaaatcttggtgatgaagttgttgtaacggttattgcaactgggattgatgaagataacaacaaacgtcgtccagcaacaaacaattcagcaccaaagacaacagcgccttcaacaccatcagaacaaaataatgatccatttgtagattgggatatgcgtcgcgaaccaagtgcccgcgagcaagcgcaagcaactgaaaaatttgatgaaattgaaaagaaagatttcgatatcttcaaacggacagcccaagcggatgataataagcaagataacccaaatggggacgatgtgccgccatttttcaagcgccgtcgcaataactaaggaggatgactcatggctggtaagtttagtcttagcaattttttcggcatgtcagatgaagatgaatatgctaatacgcaagaaactgcggctgtcactaatgaaggtgaaccaagtgttcgcccgaataacgtcgtctcgatgcaagctgcgggagctactaaaatgaataaaattgtcttatgtgaaccacggatttattccgacgcaaaaaaagtcggcaaaagtttacttgaaaataaagcagtgattgttaacttcacacgaattgaagcgacacaagccactcgaattgttgatttcctaacaggggcagtttttgccatcaacggtgaaattcaacgggttggtgatcagattttcttatgtacgccaccgaactatgaaatcgatggtaatctttcagatattgtcgatcaaaatgattttgatattgaggtgaactaggtgcaactatttttattttatgtgctcttgatgctcatgtatgtggtacggatttatagtggcatcgtcgtaatctattgtttattaacgtggattccagaggcgatgggcagtaaattagggcgctttgttgctaagttagttgaacctttcttagaaatctttgaccgcttcattcctgcaatcggtggtattgggatttcagccattgctgcgtttttcgttttatatttagtagaacgtgggatcggcttactcgcacaattattagtggggatgtaatcaatggtcaatcaagcagatgtctatcaacattttagaaaaagcgaggcgccatttgttgcgcaggttttggattggattgagcaagcacaagttgaatatcgaccaatcttaacggcgtttttagatccgcgtcaagcgtttattttacaaaccttggtcggtgaaaaaggggacgtccgttatcactttaatggcggatataacgctgctgaacggaaacgggcaatgattgctccagattactttgaaccaacggatgcggattttgagattcaattatttgagattcggtacccgattaaatttgcaaacctatcacatgggaaggtgcttggcacgcttgtgaatgctggcattgaccgtgatgtttttggggatattatgaccgatgaagaacgctggcaattctttgtgacgaagaagatggcaggctatgtcgaagagcaaatcactaagattggtcgcgtatcagttcatttgcaagaacaagactatacacagttgttgacgcctaaggacgcttggcaattcgaacaaacgactgtcagctcgtttcgcttggatacgatcatttcaactgtttacaatctgtcgcgacaacgcgctaaagaattaattcaagccaacaaagttaaactgaattggcaagcatttgataaaccagattttgaattagcactattagatatcgtctctgttcgtggttttggccggattcaactccaatcgattgatggtcagactcgtaaagaaaaatatcgagtgacactggggattttaagaaaataattgctgaaaaagatggaggaatttcaaaatggttttaacacctttagatattcataacaaagaatttaacacaaaaatgcggggttacaatccggatcaagtcaatgatttcttagatcaagtgattaaagactacgaatcagttttaacagaaaatgaaagtttaaaagcggaattaaaatcaagcgatgaaaaagtaacgtattttaatgaattgaaagatgcgttgaaccaatcaatcattgttgcacaagaagcggctgaccgtgttaaagataacgctaaaaaagaagctgaaatgattcaaactgaatcagaaaagaatgcaaaatcaatgttggatgatgcaactgaaaaatcaaaccacatcattgacgatgcaactgaacgtgcaaaacaaattgcaatcgaaaccgatgacttgaagaaacaaacacggattttccgtcaaagattacaagttatgcttgaatcacaattagaagtggttaagagtcctgaatggacagatttattagctaaagatgatttagcggaccatcaagctctttcagctgaaattgatatgacagaccttgacaaccatgggtcaaatcaagtaaactcggatgcagaagttaaaccttggggtcaaattgctgaagatgatgtgacaacaacgcaaaccattattttccctggtgaagaaacaccagtcgaagaagatgacaatgatgaagtactctccgatgtagtcgaagacaccgattcagatgaagtggttgaagctgttacggattcttacaacccaattgaaaaccaagcaacagatttaaataaggactagcaagcaaaacatcatttaagcgagccaacgacggtggaaggttggtaatgctctgtttagcggtgtatcaccttatttcattccagatgaattgagtaatttgggacgcttaatgcgcgttattgcatgttgaggaaggtcattgaccttcaaatttaggtggtaccacgaagatttcgtcctattcagggcgggatctttttttgtttttaaaaataaaggagtgatttgatgcgtatcaaagaaacattaaacctgggcaagacagctttcccaatgcgagcaggtttaccgaatcgtgaaatcgattggcaaaaaggttgggccgataacaacctctatcaacaacggcaaaaattaaatgaaggtaaaccttcattcgttcttcatgatggcccgccatttgcgaacggcaacatccacatgggtcacgccttaaataaaacaagtaaagatattatcgttcgttacaaagcaatgaacgggttccgcgcaccttttgttcctggatgggatacacatggtttgccaatcgaacaagccttggctaaaaaaggtatcaagcggaaagaaatgagcctcgttgattatcgtaaactttgttacgactatgccatggaacaagtcaacaagcaacgcgaagatttcaagcgtcttgggatttctgctgattgggataacccatacatcactttaacagctgattttgaagctgaagaaattcgggtcttcggtgaaatggctaaaaaaggttatatctataaaggtaagaagcccgtttactggtcaccttcatcagaatcaactttagcggaagctgaaattgaatacaaagacatcaagtcaccatcaatgtacgtggcgtttaacgtggtggatgggaaagacttattagatgcggatacaaaattcatcatctggacaacaaccccatggacaattcctgctaacttagggattgcggttaacccagctttcgattacgttcaagtgttagctgacggccaaaaatacgttgtggcagcagaacgtttgaacaagatgactgatcttcttggttgggaatcagttgaaatcttgaagactttcaagggtgctgacatggaattaatgacagcccgccacccattatatgaccgtgaatcattggtgatcttaggcaaccacgtgacattagaaactgggactggtttagtgcatacggcaccaggtcacggtgaagatgattataacgctggcactaaatataagttaccagtcctttcagtcgttgacagcaaagggattatgactgaagatgcccctggttttgaaggcgtttattacgataaagccaacccaatggtgacagaagcgcttgaaaagaacggttcattattgaaactcgacttcttcacgcatagttacccacatgactggcggacaaagaaacccgttatcttccgggcaacagcccaatggtttgcttcaatcgatgcgttccgcgatcaaatcttagcacaaatcgaaaaagttgaattcatgccagaatggggaaagacccgtctttacaacatgattcgtgatcgtggcgattgggttatctctcgtcaacgggcatggggtgtgccattaccaatcttctatgctgaagacggcacagaaatcgtcatgccagaaacaatcgaacgtgtggcgcaactctttgcagagcatggttcaaacgtttggtttgaatgggatgctaaagacttattaccagcaggctttacacatcctgggagtccaaatggtgaatttacaaaagaaaaagatatcatggatgtctggtttgattcaggttcatcacatcaagctgtgttagcggctcgcgatgacttaacttatccagcggacttaatcttagaaggttcagatcaatatcgtggctggtttaactcaagtttaattaccagtgttgcagttggcgaagtcagcccttataaagctgttatttcacaaggctttgtcttagatggtaacggtcgtaagatgagtaaatcacttgggaacacaatcttgcctgaaaagatcatcaaacaaatgggggcggatattgtgcgcctctgggtcgcttcagttgatgctagctcagacgtgaaagtcacaatggaaaacttccaacaagtcggtgaagcttaccggaagatccggaacacaatgcggttcatgattgcgaacacaactgatttcgatcctgctaaagatacagttgattacgcagaattaggttcagttgataagttcatgttggtgcgcttaaacgcaatcatcgccagctgtaaagcggcgtatgatgcttacgactttgccacagtttataagacaattaacatgttcttgacgaacgaattatcagccttctacttagacttcgccaaagacgttgtttatatcgatggtcaaaatgatgcacctcgtcgtaacatacaaactgttttctatgcagtagcagtagccttgacgaagttattgacaccaatcttgccacacacagctgaagaaatctggagctacttacacgaaccagaagaattcgttcaattagctgaaatgccagaagttgaacattttgccggtgaagaagacttagttgaaacttggaacgccttcatggggattcgcgacgatgtcttaaaagctcttgaaacagctcggatggacaaggtcatcggtaagtcattagaagcggccgtaacactttatcccaacgaagccaatgctgctttattagcttcattggatgctgatgttaaacaattattgattgtctcacaattaacaattgcggatcaatcagccgatgttccaacagaagcgacacaatttgatggcattgcggtcagagttgcgcatgctgagggggacgtctgtgatcgttgtcggatgattaagactgatatcggttcagatgataagttcccaatgctttgtgcgcgttgtgctgcaattgtcacagccaactacccagaagcagttgcggaaggtttagaaaaataataatcactaaaagcggtgcgaacttttacgttcgcaccgctttttttgtgcagtcaagagtaaatagataacgttttcatgataaaagattaatctttgctaataatttcactattaatgattatttgttgttagaatgaaaatagtaatcggaacgggtgggtaaatgacacgacgacaagcgactaagcgctatatggcaatgattttaatcgaattattaatggatcaaaaagcgacgaaattgacggtcgcgacttttttgaagacggctaatttatcacgaacgaccttttataatcattttccaacgggcatgtgcggcttattttggtggacacttgaacaacaaattattcaaaaagttgatgagagtatagtgagtggcgattgggaatccggctgtcatgaagccattcaatttattacacggtatcgcatgttttgcttgaatttatatcatctagcggattatccggaacgccgccgcttttttgaacaggttatgaaacagattattcataaggcattgcgccattacaaagcacaatacacgccacaacagttaaatcacttggaagacttttacggcggtgcaatcattcgccaattagattgttggtttgaaaataatctgcagaccgaaccggaggtgattgatgagcggttatgttttaatttgaagcagcttgagaaaatcgttaaaagtgactaaacaatttagtgatattgttcactttccggacaattcgctgaacttgtaactggaatgctgcccaggttttgctacactaaggatgtaccaaaaaataatattaatagcaactccacacaacgaaaagccctaccatatttggtagggctttttgtatgcgaaaaaggtagcggttacattaatggcgtaaccgccgccttcaattgaaattaactattatttctgatcttttgctgcgtattcagcatttctttttttcatttggaatgcataccagatgaagattaacaaatatgctgcaagtgctgctaaggcatagagaacaaatttaatatctccttggctagcgttaccaactaagtagcctaagaatttttcaataggaccttccatcgttgtatgagagattagagcgctttgtgaaattccttttggaaatgcaccaacagatttcgctgttgctgtgacaaaaggtgctgataatgtaccagcccaaaggaagataggcaattccaaggctccaataataatcattctaagaaccttaccacgagtaactactaatagtgctggtgtaacacccatggcaataataccacctagtggtaatagtttgttgcctggtaaaacgagtgcttcaagtaacataatgggtgctaaaacattggcagcagcccaaacttcggcacgtccagcaataaatggccaatctaaaccaatattgagtttgcgcccttggagtttactgttcgcaaaatttgtaattccttgagaaagtggttcaacagctgcaataaaccaagaaccgattagtgagaatagttccaaacagaaagccgctgtaaatgatagggcaaaaatttcttttggtccttgtccagaaagaagtccgatgaaaattcctaaataaatcccaattgcaaatttactaccccagaaaccgatttttttgtttaatttagcagcatcaaaatcgtatttatctaaccatgggaataatttgtcaaaaatcttatcaaagaccatgataacagggttcatcatgtaattcatatgtgttgttgtcattgggtttgaatctggtgcgtttaataaatcattgaacgttggtttcatcaagtcagagttgataatcttaagaacgccgatgaaaatgactaataatgttgcaatgattaagttagcgccacagtagattgagaataagccaacgaaagcaaggtgccagatatcaaagatatcaacatctaatgtgtttgtcttcttcaaaatcaacatgacgatgttgacaatcaccataattaataagaagtaaagggtgtatggtgaaccccaagtgatagttgcaagtggtgcccaaccaacgtcagttgctgagaggttaatcccagttgacttaacaaattcggttaaggcgccttggaatgaggttgttaacaccccgataactgccccgatagcagttaaagcaatcgctaatttaatcccaccttctaaggctttagaaagtttaactttgaagagtaatgcgattaacgttagaacaatcatcatcattggtgcggcaccaagatcaatgattggttggaacacaacattggcaaaatggatgatagtagacatagatacatctccttagattagcaaaagaactgctttatttgttcagatttttgattgcctcttcaacttgatcaaatacaggtgctgccattgcaggaatccgatagagaatagggccagcatcaatcactggaatggatggttcgaaacctaaatcagttgcagcaattggtgtaaagatatcataatgttgcatcatttcttctgtgatgtccttaaccataacggcgtcagctgtcacttcataaccacgatctgccatttctgtttctaaagcactcttaatttggtgacttgagttaacaccagcaccacaagcagctaaaattttaatcataataaaaaccccctaattaattttgaaaatggtttgctaaaaattgataaattgattcggttgattctaattggaagaatgccattaagtcatccttaggtgtccggctgagaaaatccatgatgttcgctaggatcccagcttgatcgcctaaatcatcatttaggatcatgaacaaaaaacgaacttcaaatgacgcatccggtgcgatcatattatggaatgtaatcggatggttcaatttaaccggtacaatccgacaggttttaacgaattcactttctgtatgtggaattgcaatattgggataatgactagaaataacggttaaatccaagcctgtcggataattggcttctcgactaatgaggttttcaagaaaatcggccgtgactaattcttgttgataaagtttttgggcaatttccttaaaaacggcatcttgagatgtcgcatcactgataaaggttgtttcttgatgaaataataaagatgttgaaagatcttgctgcattttatcacctccacttgagtaaaaaagtttgataatgtttgtaaatgtttacaggtaaagtgtaaccgcttactaaagagctgtcaaccgtttttatcacaaaattaacttaagtgacgggcacattaagtagtagttttagattaaaacaaaaataaattaatttaaaagaatgcattgcaaacaattgataattgggtaattcaactcggtcgtgttttttattttaggctgcaatcaaactcgcaattaaatggcaccgaggtgcggtaaaggtgggtcactaaaaggattgatggtaatcagaaaaagtgaatggcgcgtattttgacgtggattttagtgaaaaaaccaactgggggacttgacattttggtgtgtagatgataatttatgttcgaaacaaacattttcgaacaaagaggtgatgaaatgctaaaacgtgaacgactggtcgcaattcttagaatggttaatgcttcagggttggtgacaacaaccaaattgatggaaacgctcaatgtttctgacatgacaattcgccgtgatttggatgaattaaaccaaagcgggaaactaattcgcatccatggtggtgcacagagtatcaaaggccccacgttatatgaactttcacatattgaaaagcgagaaattcatatcgatgctaagcaaaaagtggcaaagttgggggcacagttcgttaaggaagaagacacaatcttcattggttcaggaacaaccttggaattgttggcgcaatacattcaagtcaattcgctaagagttgtgacaaatagtttgccagtgtttgaaagtattcaaacgcgcgacaataattgggaattagtcctagtgggtggcaattatcgtagtcgttcaggggcctttattgggaatttagccaatgcaacgttggagacactgaaatacgacaagacgttcattggagttaacggcatccataatgaaacaatcatgaatgcgagtgctgaagaaggcaagacgcaagggattgctttgaataatgcacagcagaaattcattttggcagacgctagcaagctcaatcgggatgatttctatcacttctatagtttgtatgatgttgatgttttaattaccgatcaatcaattacaaacgaggaggtcaagcagtattctcagtttacgaagctagtcaaataaaataaataggagtgaataatatgaaaatcgcaattgcaactgatcaagcaggatttggattaaaggaacatatcaaacaatatctaatagaaaaaaatctagaagtggttgatttaacaccaacgccagctgctgattttgtagactcagcagtttcagtgagtgaagctgttttaaaaggtgaagtagatcgcggcatcatgtttgacgaattcggccttggctcagcaatggcaagcaacaagctacacggcatggtaacagctaacgtaactgaagaaaatacagcacatatgaccactgaacataatggggccaaagcaatcgcaatcggtgctggtttggtcggcaataaacttgcagaagcaatcgttgatgaatacctgagtgttgattacgcgggcggccgtcatcagattcgtttagatatgttggagaaattaatttaatcggaggtcactataatgaaaattgctattggaaatgatcacattgttacagctgaaaaaatgaagatttcagatttcttgaaggcccaaggacatgatgtgattgatgttgggacatatgataatacaagaacgcattacccaatgtttggcttgaaggttgcggatttagtccgtgatcaaaaggctgatttaggggtagtcatttgcggtactggtgttgggatttcaactgccgctgataagaataaagggattcgggctgcattagtagccgatccagtggctgctagatatgctaaagaacatttagatgctaatgtgattagttttggtggcgcagtggttggcgaacatttaggtgaagaaattgtccgcgcattcatcgaagcgtcataccaagggacaccagaagatgacaagttaattgctaaaattgatgccttagaacctgataatccagaacaacacgacaatccacacttctttgatcgtgaaaataaactctgggcagaagggtactatcacgattagaatgtaatcgcttacgctttaattaagaccacaatttatgttgttagatatagcattaaccgatttgatcgcagttaaaaattaactaaatgaaggatgggtaaaaatatgtcaccaaataaattagctttattaaagaaaatgtcaaatgaagatggcgtcattgcagcattagcaattgaccaacgcggttcattgaaaaaaatgttagcgagtgcttctgacacggaagaagtaaccgaccaagatgtgattgaatttaaaaaggcgatttcgtcagaattaacaccatattcttcatcaatcttacttgatccagaatacgggctaccagcaactaaagtgacagctaatggaactgggcttttaattgcttatgaaaaaacgggttatgattcaactgagccaggtagaatgcctgatttaatcagtgaatggtcagcaaaacgcttaaaagaagctggcgcagactctgttaagttccttttatactatgatgtggatgaagatgccagcatcaatgataagaaacaagcctttgttgaacggattggttctgaatgtctggcagaggatttaccattcttctgtgaattagtcacatacgacgctaagaacgacgatgtaaaaggtgcagaattcgctaaagttaaaccacacaaagtgattgaaatgatgaaggaattctctaaagaccgctacaacatcgacgtgctgaaggtcgaagttccggttaatatggcatatgttgaaggcttcaatgaagatcgtcccgctgtttatactaaggcagaagcaacgaagtacttcaaggaacaaagtgatgcaactgcattaccatatatcttcttgagtgctggtgtttcagcagaacttttccaagacacattgaaatttgcgcatgaagccggcgcacaattcaacggtgttttatgtggccgtgcaacttggaaaaacagtgttgcaccatttgctaaggaccatgaagctggccgtcaatggttaagaaccaacggtaaagataatatcgtggctttaaacgaagtcttaaaagtaacagcaacaccgtggtttgataaaatacgttcataattcctaattgaaggtgagtcaatcaatgacaacattagaagcactgcaagcggctaatccgcagtatcaaattctcacggtcgatgatcctagttttcgacaatttggcgtttgttatccgcaatatgatttaacgaccattaaacaagcgatggcatcgattccggttaaagatcagaatgtgtatgtcaccagtaatccgcagttagaagcaatctcaatgatgcaagctattggccgtgatgttttcgcggggatggcaatcgaagcaggggagtgtacggggcatacgagtgacttttcagcaatcgaatatcaccaaggtagtgaagtgaacattacattgactgacgtggtaatggtgcttggcaaacgcgctgatttagaacctaaccaacaatttgatccacaccaggatgcgaaattattctatattcctgctggtcaagtagtggaattctatagcgatacgttgcattacagccccattcaagtcactgctgcggggttcaaagtcattgtcatgttactggctggaagcaatgaaccatttacccaaccactggtaacggataatcacagaatcgtaaaacaaaataaattccaattagtgcacgcatcgcgaacggataagatcgaacaaggcattcaagtcggtgtgaccggcgagctgattaaaattaaatcaatatcgatctaaagggggagcattttgttaacaattgaatctgatgcattattagtcaagattaatgaaaaaggcgcagaattaacacaaatcacgaataagcaaaaccaaattgattatctgtggtctggtgaaagctggcaacgccatgcgccaattttattcccagcaattgggcgttcaaacgataaccattacttaatcagtggtcaatcgtatgaaatgccgcaacacggttttgcacgcgaccgtgtgtggcaagttgtcacacagacaccagccagtgtgacgttacgcctaactagcaatcaacaaacgcaacccttattcccatttaattttgaattgctagtcacctatcaaatcgttgaaaatcgcctagactcccagtatgaagtctgcaatctggattcggctgattttagctttgcgttaggtagtcatccaggttttaacgtgccccttgcgcgtggaacagaatttacggattattatttggattttggcgagcaagttgcacaattagatttgtatgcgattgatcctgcaccatttcgttcaggcaaacgccaagtcttagcgcttgaaaaaggccgttttgaattgcaacatgcccggtttgatcaaggattattattgttcgatcggcccagtcaacaggttagcttgaaaagcgccgtgacggatgcgcaaatcacattaacgacgactgattttccatacatggcgttatggacgttggaaaatcagacggaaaacttcttatgcattgagccatttgcaggaatgcctgatcaatatggccaagttcaagaattgctgacaaaagaagcgaaccaagttttgagtggtggacagtcgcaacaatttaagtatcaactgacttttgaataagcaactgttaagaaggttcccttgctgggggccttttttacattcctattcagtttgggttatactagtaatcagcaactattctgatcaatgaattgaagaggaaccagtcatgagtaaaaaattagtgattaccgaaaaaccgagtgttgccaaagagcttgctaaagttctaggaacaactcagaaaactaaaacctattttgagggcgatcaatacgtcatcacttgggcgtttgggcatttgttatcgctgcaattaccagaggatatcaaaaaagaatggcaacaatggcgtttggaagacttaccgattattccgaaacatatcggcttaaagccattgcctaaaacgggtgggcaattaaaagccatcagtcacctcgccaaccgcaaagatatttcaggtgcggtgattgcaactgattcggggcgtgaaggggaagccgttgcgcgctatattttggaatggattaaattcgataagccggttgaacggctctggatttcatcgcaaacgactaaggccattaaagcagggtttgcaaacttaaaaccagccaagcaattcgacaatttgtacgcatcagcgttagcacgcggcaaagcggattggttgattggcttgaacgtgacacgggcattgacgaccaagtatgaagataatttatccgctggtcgggtgcagacaccaacgttagcctttgtgaacgaaacggcacaacaaattaatcgttttaaaccgcaaacctactacacaattcacttgacggtcgatcaacagcaagccgccttacaattagcaaatccgcaaagtattaagacgcgccaagcggcagacgacttagttgcacaattgcaacaagccaaaggccaagtggtcagcgtcaaaacaacgcagaaatcgcaatcagcacctttaccatatgatttaacggaactccaacaagtggccaacgcaaagtatggtttatccgcgaaaaagacgttatccttgattcaatcattgtatgaaatccataaagttgttagttatccacggacggattcgaaatatctctcaacagatatcgaagggactttgaaggaacggttgtcggcattagtcaaatttgatccacgtgctaagcaatacttggggcaaggcagtcaggtcaaacaaaaagccgtctttaatgatggcaaagtaacggatcactacgctttaattccaactgaagaacccgttcgtgccgaaaaattatcgacggatgaactacgcatgtatcgcttgattgtagaacgctttttagggttatttgctgatccatacgtgacagctgttacgaaagccaccgttaagtttggtgatcaaacctttacgtttaagcaaacaaaagtcgtgcaacaaggttggcatgctgccgataaagaggggcaaccaaccgcgacggtcgactggcgagaagggatggtagttcgcgctaattttgcggttaaagaacaattgacgacgccacctaagccattgactgaagggacgttgctcgggaagatggaacactacggtttggggacgcctgccactcgtgctgaaatcatcgaaaaattagtccgtagtgaactcctagaacgacaaggtcatgctttagcagtgacgccaaaaggccagcaacttttgaaattggttaatcagaccttggtttcaccagaactgacaggaaaatgggaacagtcgcttgaagcgattgccaaaggcgaagaaaatccgaaggcgttcatcactgaaatcgagggtgccactaagaccttggtcggtgagattaaaaagagtgagacggaataccgcgattttgcagtgacgaataaaaaatgtccggaatgtgatcatccgttaaaagaacgcaatacgcgtgacggtaaaatttatatctgcacaaactgtcactatcggcgtcggaaagatccgaaggtttccaaccaccgctgcccacaatgtcacaagaaaatggtgattattgaagggcaaggtggcgcatacttccggtgtcttaatgatgggacgaccgaaaagatgctcgacaagaaagatcgtaagaagaaaatctctaaacatgaagaacgccgcttgattcaaaaagtgaaccaagaagatgaaccagcggaaagtccattagccgctgcattgcgtaaggcaatggaaaaataagctagcaaaagaggtagcaactagaattattctggttgctacctcttttttttgtttagaaaagttgtttgacttgttgtttggtgcggtcaacaatattctgaccgtctttgacttgcatgctagcatctaagtgagaacgaccagtcatgtaatcgaatgcgacgccaggttcaacattccagacgtaatcgttgaaattcagcgtgccatctgttgaaatggcttgaacccagtaaccgcgcggcatcagttcattaccccgaaaaacggtcgtgactttgtaaatcacttttttgtttgcttcgagcgcagtgcggactttttcttcaaaaatctgcatcgttttctgattactgtacgcgctttgggtggcgaggttaagtggattatctaaactgcctggttgaccagcttgaaagttaccattctgatcaaaattaaaagtgagtgtataagcaatcaagtggccacgattttgcggtgtgattcggcggccattgacaatcagaggttgattatgccaacccgttggattccaaatttggcgcgtccggccttctgatttgcccagattccgctttgataagtaagctgtgacgctagttgttcggttaagctggtcgagttgcccatagacgattttttcaccttgccaatccgttgctgttaattggctttgttcgttattaattggtagataggccgcagctccgcttttaaaatcttgatcagcgatggcttgataatcaggactgactgggggtgtttgtttagctggttgctcagtagcaactgtagcagggaacacattttgtaagacattgttgcgaccaccgagataaccgactgccaagatagcaatggttaagatggttcgtctaatttttttcgttttcaaaagagatactcctattaatgaaaattgatttgagacaagataaaaacccacgagatgaattgatcatcggtgggctgaaggtattattttgaactattgcgtagtgtcagcgtcgtgccaatcgtaatgacttgggggataatttcgctagcggcgagttgtttaaccaataactcggcagctgattggcccatttgttcagtgtaaactttaacggaacttaaagtagggaacgtgtattggcaaattgaggtatcgttgaaactaatcaggctgagttgttcagggactttgatgcctgattcatgtaaggcgcgtaaagcgccgactgccattgcatcattggcgatgaagagggcttctggtaaatcggaactttggtcttgtaataattgtatcatgagttggtaacctgattcgggtgtaaagtcaccggttaaaatccaatcggggtgatagtttttttgagctttgagtaacgtcttaaaatgaataaaacggggatccggtcccaatttagtattatcagcagtgctctcttgaccagttaacataccaattttagttaagccagcggttgtaaaatggttgattacggatttaattggtgttttgaagtcggtcatcacacagctgacttcataatcgagcgtgttcatgtcgacgaagacgaggttgtggttgagttttttgaggcgcttaatctgcgcagggctgtacttaccaattaccacagcacccgtagcatcatggagcgtatcaaatggatcgttttgaaagaagcgtgttacgtcataaccaagttctttgagtttcttttcaacgccaagtcggatggagaggtagtatagatcttccaattcttctttagcggtataccattcgacaatcgcaatgcgtccgcgttgctggttcattttgcgcgtgtttttacgatagtttaaactttcggcggcttcgaaaatccgttgccgggtctcatcgccaaccgaaagtgtttgatcataatttaggacccgcgaaacggttgcattcgaaacgttagcgagttgagcaatatctttgatcgttgccaaggtgcacctctcaattcaatgtttactattacttagtttagcataaccaatgaaaagaaagcgatagttaacaaaaaagattgattttttagtaaatgtttagtaaaatgaaagcgattaataaaggaggaatttactatgaacatgacagaattaaatactgcattcgaaaacgcattccacaaagcaccggaagcgagctacttcgcaccaggtcggattaacttgattggtgaacatactgattacaacggcgggcatgttttcccaaccgcgatcacattgggcacatatgcagtcgttgctaaacgtgatgaccaaacaatcaatttattatctgggaactttgaagatgcgggtgtcatttcatttgacctcagcgacttatcttatcaaaaggcccacaactgggcgaactatccaaaagggatgattgtttaccttcaagaacaaggttacacaatcgacagtggtttggatatttatttaaaaggcaatattccaaacggcgctggcttatcatcatccgcatcaattgaattattaatgggtgtgattctagaagaccaattcaatttagaaattgaccgtgtcgaccttgttaaaaccggtgtcatggttgaaaataaatttatcggcgttaactcaggcatcatggatcaatttgccgttggaatgggcaaagccaaccatgccatcttactagacacgaacacattggattacgatttagtcccaattgatttgcaagacaatgtgattattatcatgaacactaataaacgccgtgaattggccgattcaaaatataatgaacgtcgcagtgaatgtgaaaaggccttagccattttacaaacgaagaatgatattcaatcattgggcgatttagataacgaaacctttgatttacaaacatacatgctacaagatgaaaacttgttgaaacgtgcacgccatgcggtttctgaaaaccaacggacaatgaaggcccgcgaagccctgaagaacaacgaccttgaacgtttcggcaaattagttaatgcgtcacacgtgtcattgcaatttgattatgaagtgactgggatcgaattagacacactcgttcaaaccgcttggcaacaaccaggggtcttaggcgctcggatgactggtgcgggctttgggggttgtgcgattgcaattgttgctaaagaccaagtcgacaactttgaaacgaatgttgctaaagtttatacagacaagattgggtatgcgccaagtttctacgtggcagaaattgccgatggcgctaaaaaattaggttaatcagtcaactgaagaggagaatgataagatgacagttttagtattaggtggcgccggctacatcggctcgcacaccgttgatcaattaattcaacgcggcacggatgtcgccgttgtcgacagtctcgtcaccggccatcaagccgccattaatccacaagcgcgcttttattacctcctataatttttattttatcataccatttaatactgcatactagttaaatctctctaaaaatttctatccaaatggtgttacttttggtgttactttctacatgcacaaacaaaaaaagccagaaacgccttcaaataggcatttctagcttatgcaattcaattaccccacactgccttccatttcataactaatcaatcgattcaattccaccgcgtattccattgggagttccttggtgaatggttcgacgaagcccatgatgatcatttcggttgctttggcttccgagatgccacggctcatcagataatagagttgttcttcagaaattttagagactttggcttcatgttccattgaaacgttgccgtttagaattgtgttgtacggaatcgtatcagagctggagcggtcatccataataatcgtatcacattcgacatgggcaaacgaaccgtcactgtcgcgttcaaaacgaacagtcccgcggtaatcaacggccccgccatctttggcaatcgattttgaaacgattgaggatgacgtattcggtgcggcgtgaatcatccgcgcgccactgtcttgatcaacgccttcgccggcgacggcgattgagagcatggttccgcgggcaccttcaccatcgaggtagacacttgggtatttcatggtcatcttcgaaccgagattcccgtcgacccattccattgtcgcattttccatggcttgggcccgtttagtttccaaactataaacgttctttgaccagttttgaatggtcgtatagcggcaatagccatcccgtttcacaaagacttcaacgaccgctgcgtgcaagctatcacttgaatagcttggtgcagtacagccttcaacgtagttcacgctggcgccttcatcgacaataatcaatgtccgttcgaattgacctgaattttcggcgttaatccggaagtacgattggattggaatatccgtccgcacgccttttggaacgtagatgaacgtgccacctgaccaaacggccgagttaagcgctgagaatttattatcagttggtttgaccaacgtactgaagtattccttcacaatttcagggtattcgcgtaaaccggtatccatatcggtaaaaatgatcccaagtttttcgaattcttcacgcatgttgtgataaaccacttctgattcatattgcgcactggaacctgctaaatacttacgttcggcttcaggcacacctaagcgatcaaacgtttctttgattttgtcgggaacatcttcccaatcgcggtattgcttgtccgttgccttttgataatacaacatgtgttctaaatcaagatcggataagtccggtccgaaatctggcattggcattttttcataagcgtgaaatgattttaagcggaaatctaacatccattgtggttcctttttctcacgcgagatggcgcgcacaacgtcttccgttaaaccgcgcccagttgaaaagacgggctctacatcgtcgctaaagccgtagtcgtactcttcaaattggggcatcgttgtctcttctgtcattcgttagtttcctccgtttctgcgtggttcatcatttgaccggttgttgcacgtcggtcatcgctatttaaggctttgtggagcgccttccaagctaaagtcgcgcatttaatccgcgcagggaattgttgcaccccttgtaaaatcgcggcatcttctaacaatgaccagtcttcgtcacgatcaccaatcatcatatccgaaaagcgttcgatcatcgcctccgcttgcgccggtgtcttatgcatcacggcatcggtcatcatgctggcagaagcctggctaatcgtacagccttcccctgaaaaagcaatctgactaatctgcccgtcttcgagcaccagttcaagttgtaacacatcgccacaggtggggttgcgtaattcaatttcatgatcggcagtcgtcaagtgaccatgatgatgcggatgttgcgaatggtcaagaatgacctgccgatataagttatctaatttagagagtgccattttggaaaaactcctttgctgcttgaatggcggtcacgaacgttttcacgtccgcttcggtattgtagaggtaaaaactagcgcgcgcggttgcggcaacgttcaaccattgcatcaacggttgtgcgcagtgatgaccagcacgtacggcaacgccttccatatcgagggcggtcgctaaatcatgtggatgtaaattgtcgagattaaaggcaatcacaccggtgcgttgggcggcatcttgtgggccataaatcgtgaggccgtcgattgcttggagctgcggtaaagccattgtgactagcgcttgttcatgggcttggatatgatccatcccaatttgcgttaaataatcaatggcggcccctaagccaattgcccccgcaatgtttggcgttccaccttcaagacgccacggtaattctttaaacgttgaagattgtaagcccacaaagtcgatcatctcgccgccgtattccacgggtggcatctgttcaagtaatgcttgcttgccataaagcacaccaatgccggttggtccaagcatcttatgccctgaaaaggcgtaaaagtccgcatcaagtgcctgcacatcaaccatcatgtgcggcacggcttgtgcaccatcgaccaccatgtaaccgccttgtgtatggactaaagccgcaattgttttaatcggattgacaaccccaagtacgttggaagcatgcgccaaactaacaattttcgtcttaggcccaatcacctggcgtgctgactctaaatcgatttgcccatccggtaataagtcgatgtaacgcaatttcgcgcccgttttctgcgccagttgttgccacggcacgagattactatgatgttccatcacactaatcacgatttcatcgccggcttcaaccacggttgggccgaaactgcctgcaacccagttcaaactttgcgtcgtcccttttgtgaaaatcacttcggcactcgcagcggcatggatgaaggtttggaccttcgtgcgcgcggcttcatactgggcggttgctcgttcagctaaagtatgcacaccacgatgcacgttcgcattgtcattttggtaataagccaccaaccggtcaatcacggcttgtggtttttgggtggtcgccgcattgtctaaataaacaagtggttcatcattgacgatttggtctaaaatcggaaagtcgcaccgataatcatttaactggttgaccatcgattaacttcctttcaatcgtgtccgttaattgttggcgcacgtttttatccggaatttcacttagaacagcgcctaagaaaccacgaattacaagtcgttgcgcgacttcttttgaaagaccgcgactcattaaataatacatttgttgttcatcaacgcgcccgacactggcagcatggccagcttgcacgtcattttcatcaattaataagagtgggttcgcatccccgcgtgctgtccgcgataacatcaagacgcgattttcttgttgggcatcggcacccttagccccttttaaaatatgcccgatcccgttaaacgttaacgtcgcatcttctaaaatgacgccatgttgcaagatgtgcccaattgaacgcggcccaatattcgtcacacgcgtatcaatcccttgaatctgtttaccagttgagatggcgaccactttcgtttcagcatgtgatccagcacccactaaatcagaatcaaagtcaccgatgatattgccatcattcattgatcccaatgcccaatcaatccgcgcatcgcgcatcaagtggccccggcgattcaagtaagtcgtcacggattttccaaaggcatcaaccgctgaaaaatgaacgtgactgttatctttagcaatcacttccacgacaacatttgctaagttcttgtggtcacccgctgtttggagattttcaagataactaaattcactgttttgttcggctactacgaggacgtgatgaataaaatcagcgggttgagtgctgtcctgtacataataagccgtaatgggttgcttaatcaccacatttttcggcacatacaagaagagcccactgttcatcaaagctgtgtgaaaagccgttaagcgatcctcgttcggtttcactgtgacttgcatgtagtattgttgtaccaaatcaggatgttcttgtaacgcggtgaaaatgtcggtaaaaatgacaccttgttctgccaattctgccggtaaatttaacttggcagttgtctgaccaatctgtactgcgtacggttgatcagctgaaagattcgctgccacagatggcattaaactcaaatcggatttaacggctgttggcgcatttgctgccatcactggccaatgtttatagttaattttttcaaagataggcagttcgagttgctcaatttgcgcaaacgctgcttgacgcatttcagcaaaccaggccggttcttgatgcaattgtgagaatgacgcgatttgttcaggcgtgatggctaatgttttcttcatcagaatcgccccctatttactttcgtcgtcagtcagtttgatatccaagcctaattcgtcacgaatcccgacataaccttcgtcttccaaacgttttgcaagtgacgcatcaccagtcgtgacgattttgccacccatcatgatgtgcacataatctggcacgatgtagtttaagagccgttgataatgtgtgatgattaatgagccaaaatcagccccgcgcatttcgttcacgccttttgaaacgacttgcaaggcatcaatatcaagtccggaatcaatttcgtctaggatggcgaatttgggttcaatcatcatcaattgcagaatttcattccgtttcttttcacccccagaaaatccttcgtttaagtaacgttctgacatttcttccgtcatatccaagaatgccatccgttgatctaattttttcaagaaagccatcactgaaatctgatcatcttcagcccgacgtgcattaatcgccgcacgcatgaattcagcgttcgttaccccttgaatttcagcaggatattgcatcgccaaaaataaccccgcacgggcgcgttcatcaaccggcatttctaaaatattttggccatctagtttgatctgaccttgtagtacctcatacttgggattgcccataatcgtttccgaaagcgtcgacttcccagtcccgttaggtcccatgatcgcgtgaatttcacccgtgttcatttccaggttaacaccttttaaaatttccttaccgtcgatgccgacgtgcaaatcgataatctctaatttagacatagatgaccctccaagaatcgcattctagcaattattatacgctcttaattctatgctaattgagaactgttttcaatgcttgaatgcatgaaaaaagaccacgcggacaacgtgatctttttcaatagattcgcacgggaaataggttaatattactcattgatttgatactcttctaaaaccgttgagccatttggtcagccacaataccggttgaactactcattgatttgatactcttctaaaactgctgtaatgccggcaaagctaaggccaacgttgaactactcattgatttgatactcttctaaaacatgttgaaacgtttaaaaactctgctgtttgttgaactactcattgatttgatactcttctaaaacgttgcctattacgtaagtcaggaatgacccgttgaactactcattgatttgatactcttctaaaacattgccaatcaggctctttcttgtagctacgttgaactactcattgatttgatactcttctaaaacagaatatccagatgatgctgatgtggctgagttgaactactcattgatttgatactcttctaaaactagcatcatattcaaacgcgtaaataataagttgaactactcattgatttgatactcttctaaaacttgcgttcagataactgtttaattgcttctggttgaactactcattgatttgatactcttctaaaacctagaatgtcggcaatagctctaatcgcctgttgaactactcattgatttgatactcttctaaaaccttatcctgataaccacgccttaatcctgtgttgaactactcattgatttgatactcttctaaaacactcaatgacgttagcacaacgtacagattgttgaactactcattgatttgatactcttctaaaaccagcgttcgagattttattggttgtgctctgttgaactactcattgatttgatactcttctaaaactctgaaacaggcggcacagatgatggcgcagttgaactactcattgatttgatactcttctaaaactgaatttagaaccagattgaaatctttggagttgaactactcattgatttgatactcttctaaaaccttttttacgggcgcgtttatttggcaaaagttgaactactcattgatttgatactcttctaaaactgtactaactgaaaaaataatagcgggtaagttgaactactcattgatttgatactcttctaaaacttaaatacctagcctacattgcagtaggcagttgaactactcattgatttgatactcttctaaaaccggcaatccttttaaatccagaattaactggttgaactactcattgatttgatactcttctaaaactacacaagttgcggataccaaagctggtttgttgaactactcattgatttgatactcttctaaaaccgttggcatagatagttaccatatcagccagttgaactactcattgatttgatactcttctaaaacaagtatagtcaactatatagctaccgttaggttgaactactcattgatttgatactcttctaaaactctaagtaattcatcggcatccatcccgatgttgaactactcattgatttgatactcttctaaaacagaacaaaaagccattatgtctgttaaagggttgaactactcattgatttgatactcttctaaaactgcagaaagagggggattcacatgaagactgttgaactactcattgatttgatactcttctaaaactctaagtaattcatcggcatccatcccgatgttgaactactcattgatttgatactcttctaaaacaagaagactgcgttgacgacattagtttgtgttgaactactcattgatttgatactcttctaaaacatacgtttcgcaatccgtaccagttccggggttgaactactcattgatttgatactcttctaaaactgatgaagcatcagcgactaagttttatatgttgaactactcattgatttgatactcttctaaaacaggaatactcatggcgttattttcaggactgttgaactactcattgatttgatactcttctaaaacaagtagcccaaaaatacgaaattagcgttggttgaactactcattgatttgatactcttctaaaaccaactgctagaccggcaaacgtttcctgtcgttgaactactcattgatttgatactcttctaaaactgatttgtatatcgatgatgagtatgtcaagttgaactactcattgatttgatactcttctaaaactaattcaatcgctttaagcgataaaattaagttgaactactcattgatttgatactcttctaaaactacagaagcacaagctgggatgaatgccttgttgaactactcattgatttgatactcttctaaaacaagagtccacaattattgcgctcaacagatgttgaactactcattgatttgatactcttctaaaacagctggcgcatcgattaaggaagtacaagagttgaactactcattgatttgatactcttctaaaactcaaaatgataaatatactgatcaaatccagttgaactactcattgatttgatactcttctaaaactagtgcaactgtaatcaatgcagatttagagttgaactactcattgatttgatactcttctaaaactcgtgcgggatagaaatttggaaatcaggggttgaactactcattgatttgatactcttctaaaacaaaagactagcatcgctttgctttgttttagttgaactactcattgatttgatactcttctaaaactaccttttggaacgattttgaccaggaaatagttgaactactcattgatttgatactcttctaaaaccggtaatactgatggatttaacgctggttagttgaactactcattgatttgatactcttctaaaacatacaccaacatcaatattattaataataagttgaactactcattgatttgatactcttctaaaacagcagttatgtttacttgggcaccattatagttgaactactcattgatttgatactcttctaaaactacttcccgatcatattcaaatgaggtgatgttgaactactcattgatttgatactcttctaaaacagttgccccgtactctgaaacgaacggtaagttgaactactcattgatttgatactcttctaaaacttgctggtcattatccttaactgaatctaagttgaactactcattgatttgatactcttctaaaactatagttgtccgcatctggtttaactgtcggttgaactactcattgatttgatactcttctaaaacattataatacggatgtgttataatatacttgttgaactactcattgatttgatactcttctaaaacagaagcactttcgtctattaatttttcagtgttgaactactcattgatttgatactcttctaaaacttagttgacattgagggcaaaacgaccgaagttgaactactcattgatttgatactcttctaaaacaattgagttagcacttcactaaattccattgttgaactactcattgatttgatactcttctaaaaccgtcgttttttcatcagaatttcattttattcatagcgccattcgacataatcattatcgatgtgataataacaacatttctggtactgatcagatttaacctcttctgaaaattcaatgagaaagagtttcacattcaatgtcgccaccaacctcaccaattcattaaattggttgatactgagatagtgcgaaacgttgatcaacgtgattatttttgattcatttaactctactgctgtctgtactatactctcaattataccatatgggtcatgttggacgacagtcgaaaattgtaaattatagaacttaatcattctttgaagatcccattcctgattgacatctaaggtcaattcatacataaaggccgcatccaaaatcgttgaacgaatctcactatctaactgagttaatttctggcgctgctgatccgttaagtcggcggcgaattttttaatcaaccgattttgaaatagatgattcaaattaattgctgccacatccccaccccaaataacagcctttgaataatccattaattcgtattgatcattgctaaatttaacggtctcttgtgcgccggacattccaataatgagtttggtatacacttctggactgcttgtactgcaaaccgttattttcttattctgaacgctaaaggggtggtatggataaaaagtaatgttcataaaattaacgtcctctcagcagaattacggacgtcatcactcgattcgcccactaagaaatgcattttattatattgttgttcagtaaccatcaacgtttgtactaagcctgcaggcggagtaaagccagcaattcggttctcgataaactgcgccgattgtttgctgacacaaactcgaacataaacagaatattgaatcattaagaaaccttcgttaagcagcgcttttctaaaatgacggtatgccttgcgatcctcgctcgtttcaactggtaaatcaaacatgactaataagcgcattattcggtacctcgtgagtcattaccacctttacttcaaactcttctttcggagttgtcatgaatttcaaacaattctgtacgtgtttagtgagtgcgtttctaagaattgtgatctgtccattatattctagctcaagattcagtaactccactaaaccaaatttaacatcaggggttaattcattaaacttttgatgtgccacccaataatcaatcactggtcgaaaaggttccattagatcggaacccaaattaaaatcactgacgccattgtgatgatgaatgccaaactgtgttaaatagccattacaaacaatttcgcgattaacggctgataacaacaaactataaccataattaagggctgcattaatgggactgtactccgttcgaacaaagtctttatcaaaaactaactgaaaatacttgcgcgcaatcacggcttctcgatttgttcgatcagcaaataccattgcatcagcttctgttgttaagtcttcaatatcctttcctaacaattgtgcacattgaatttgcatcgctattttggcttgaataatcgccgtccataaggtttctttcaaccccgttccccattcaacctgttgttgaatcgacgcgagactacgatttcctggataatccgcaattgtctcgcaagttggattaccgtctttgcctgtaaaaataatcttagcgccagcttcactcaactcagtaattgccgatgccgttaaaacggcctgggtagtcgcaactaacaaaatttggatatcatcaattggtacttggtgtgttgcatcttttgtctggacaacaatcttccgtccagaataagaaacctttgcatgttgtgaaatcacaactgttcgccaactcataaaaatttaccccctacatccttgttttcaaaatgataacatgctataatgctgttgttgagcttgatacactcaatcgaaatactcattgatttgatactctgagttaaaatcaaacaaggtcttcggaccaagttttctattctgagcctcttatgaggcctttttttatgccttcaaaccaaaaagctagcccatcattacactaatgacaggctagctttatttatttataaatcccttaaagctactcgtcgttcgaataaaccggttggagattgatagataatttgggtatcaggtgaaagagaaatccctgatggttgctgcatttgacctagtggcgtacttattttcaacacccctaagtcgataactgccgcatttgcatgtaacccaatcaagattctatctaatatgatctgttgaccaatctgtgtcatcttattaccatcccattgactcttccatggtaacttcataaaggctgctttacccgtagataatttagctctgaattgattagtatcatacagtgggaaatagtgcatcacttgatctaagatttcatcataaacttgttcagcaagttcttcagactgtgttaaaggtagcgcgccatttaataacttaacagccgttttatcaagaatcaattcctgctcattgtgtttatacgtcgcagagcccaatgtcaattcttgaccattatcgaagaaacgttgattgattaggatatgtggtgcaatgacttcgaattcttctacggcctcaatgatattacctttttgtttcttcacttttgtaaattgcggactaattttttgctctaagaatgccttttgtgaatcttcatccgtcagttgtttaagttgcgctaaccaactcgtctcaacaccacagactttatagagatcaccctttttatttttaatgcgtacaatacacatgtaggcaactgtcttacctgagtaaccaccatagagcgcagttgatcgatcttgcttagctggaatcaattgcttcccgccctgaccacttgctttatcatctttagccgcatagagcgtttgattaaatagcgctcccgaattttcatgcactccgcgggtcactagaatcttcttaaactgatatattttattcaaataagctagaccggattctttatcccaaataaccgcttcagtattttcatcaaccaattcgtctttctttagaccatttagaaaattaaagttacgccacttatcttgctgacttgccttctgatactcaccgtatacaaaataaggttttaatttaggatagcgcttcaatagatacagaccaacgaatgcggtcagataagcatcgaatgcatgatgatggttatttagattacgatttttcggaaaatcaaattctgttcgcatttggtgggttaacccactcttaaccgtaattaactcaatattatcttcaccatattgttccatcaatagatttgtcgctaacttaatgacttggcgtgtttctactaattgccggttaataaaacccttcattgcgtatttactgatatgatccggatttaacgttaaattatcatattttttcttggtaattaacccagcacgcaacatttgttcccattgaatctgcatcttttgtccaagttcgacacttgtaaagtcggtcggtacttgatctgctttactacgattcattttttgagaaactaatacccgattatctagtgagttatccttaataaacgactgtggcaaaatatgatcaatatcgtacgtcgataaacgatcaatatttaacgaatcacccgtatacatatcccgaccaccctgcatgaagtacaagaataagcgcgtattgctcaatgcagaattcgataaatccttaagttcatttctgatttcagtattatttagcaattcattgctaatattttgatagacttgttcaacttggcgcttacgttgcaccgaaagtcgtggattcacttcatcttcgcgcgcaaattcaatcaatatccgttctggcgcttggcctttcatggccttttgaatgtcattgacaacaagcagaatctggcggagcgcttttttattctgtggtgacgtatataaatcattgataacatcttgtacatcattttcagctagcatcatttgattagcttcagtaattaatttatcaaagtcttcagagtgcacaatccgcatgaagttatccgttgtatcccagagtaagtccatgattcgttgtccattcgcattgacgatttgcgttaataatttagccgacaaacgaccccaaccgcggtagcgtttagcagctaattgcacacgttgctgatctgttaaccaatcgatttcattcaatttggcgctatatattttgccgtcttcaaaaatcgttgaccattcaacacatttttccaaatcgacttgtttatcaacatcttcaaccgcatccccaacaatcgcctttaagtcatgatacgtgcttaatcgactattgaatttattctcatcagatagaccagtaattgcgggacgacttgcatagcgcttttctgataccaagtaatcctgaatatttttcactgatacacttgttttttgcataaataaatccgtaaatattgcttgtttcaactccgtcgtaatcggttggtcatcaatcttaagtccgtttaattcattcaacacttcaaaccgttgataaattaagctctgtttagggagtacatcttcagccaataaataagtatcagtcgttgtcatgcgcttaatgaattcattagcggatgcttgacggtccactttatcatcgaagttccacggtgtaatccggccttctgatttacgaatcagccacgcaaatttcgcatcggagctttgtcgttgctgctcagccgtaatcaggggccccacatagtatggtactctaaaggccactaattcgtccaatttatatttagcgactgtttgccgtttagaattgggattaagttccgctaaccaggggtaatattgttgttggttctcgataatccggtctaattcctgttgatgtagttgatgcgggattgccccattatctttggtccgttgttttggcataaattgatcaagttcaattaattttttaatttcactcacaatcggatgatctgggttgttctttaaggcttttgtgatatctccataaaaatcttccttcgaataggccttcgtattttcttgaccatcaacatattggtcataagcctgctttaatctctgtcggtcttcaggtgctaacgcttcccgtaccgcttttagcatttttaaatgcttttgatgatcgtcatacttcgtgatcatcgcttgcgacaatgattgattttcaggaacgattcccgccaatagaacaccagaataaagttcctgtaggctttcgataatttgatgggcattatcatcaagactactctctaacttgaccatttcttcatcaaagttttctgcattaaaagtgagtgtccatgctttaacatcttcggcttcgatcccagtaagcacattaaacttcgcttttaaccccaagattgcttttaataattctgtcgcaatcgccttattctgcttttcaactgccttattcgtacttggcgtataaatcagtgataatgcttgtctttgccgattgctagcactttgttgattatccaataagagcgctttgacctccgctaatttatccgtctctagttgaaagccagattcactgaacaagtcagcaaaaatcgtgtttagtctgtcaaaatgagccactaaattaatttcgctactcttaaaggatgagacgggcgcttcatttaaaaagtgcccgcgatacttcacaatatgatgcatcgctaaataaatctcgcgaatatcaaattgacgtttctcggtcattagcttatatcttaaatggtaaatcgttggataatcgtcatagaatgcccgatctgttcgatcattaaataaacttgtctgtggatataactttcgctgatccttcggacttaggtttgattgtttttgccgcaagaaaaaagtatcatcaactggcgtgatatagggttcaaagatttctcttaacaatcctaaccgccatttacgtcgttttaatcggcgacgtgttgttctaaagctgcgccgttctgcggctgtttgtccttcatcgtataaacgaaccccataaccatatttacctcttacactgaccaacttactttggtcatcaaccactgaccacccaattgaactagtaccaatatctaaaccaatattatacggacgactcattcttactccccctaaaagtttatattcaatgatagtatatccaatttaacccgctttttccaattaaattaagaattacacatgctaacagcaaaaaaagacaagtcttaatgacttgtctttgatcattattcaactggtaacactgcgccgtgccatttattcttaatccattcttgcgttgattttgatttgagcgctttaacgagcttcttgatagctgggttattgcggtcttttttatttgtcacaacaatgttggcaaatggcgaagattgcttttcaagagccacagcatccttttcagggttgagaccggcttgcacagcatagttcgagttaatcgccactaaggtgccttcatcattcttcaaaagttcaggcatgagttttggttcgaatgtgtactcaaacttgaggtgtttgggattgctagcgatgtctttaaacgttgcgttttcagcatttacgcccgatttcaaggtgattaagccaccgtcttttaaaattgttaaaacacggccccagtctggctggctgcttgaaactaatactttcgcacctgatttcacatcactcaattttttaacttgtttactgtataagccgagcggttctaagtgaatactgccaacactgactaagtcgtagccgttatctttattggccttcttcaaaaagggtttgtgttggtagtagttcgcatctaattcgccactcgctaaagctttattgggtaaaacataatcgctaaagacttttactttgaggttgatgccttcttttttcaactccggttgaacgtgtttcaaaatcgcggcgtgtggaattgcggatgccccaacgacgattgtgttgctgtctgacttcgcttctttgttaccacaagcggcaagtgcgcccgctaataagaagactgctgctaataatcctaaactgtgttttttcatgaaaactcctccttttaaattaacgatgatcaatgtgttgaacaaccaagtcgcccgttttttgacaaatgaagacgatgattaaaataatgacggttgcgactaacgtaatcgcattttggttagcttggaacccatcttggtaagcaagatttcccagcccaccggcaccaatcacccccgccattgcggtataaccaacaagtgaaattgcggtgacagttaagccggaaacaagcgccggcatgctttctggtaaaaggacttgccagacgatttggacttttgaagcgcccattgaacgggtggcttcaagcacaccgccatcgacttcccgaaaagctaattcaacgagtcgtgcataaaagggcgcggctgagatgattaacgctggaatcgcagctttcgggccaatcatcgtgcccatcaagccttttgtcaatggaatcaacaagacgattaaaatgatgaatggaatggaacgaaagacgttcactaataaagccacaatgccattcaacagccgattcactcgaccaccactcgcgtttgtttgataaagaactaacccgagtgcgaatccaagaactgccaccaataaaacactgacaattgttaaccaaactgtttcaaaagttgcttgccacatacttggccagttcacttgcttaaattgaaaataggattgaaatccgtttacgttatccatgacgtaccacctcaacttcgattgtttgttgtgctaattctgcaaggactgcctttaaatcacttggattagcttgaatttgaatgtataaatagccaagtgcgccattaatggtttgttgtaaactcccactgatgacactgatttcgactgctgggtattgacgcatcaagcgaccgatcaccggttgactcgattgttcttcgttaaatcgcagttggacgattgtaccatttggaacccgttctaacagttgatcaatcgaagcggccgtttcactcggtgataccactaaggattcagcaacaaatgccttggttgcagccatttgtggtttttcaaagatttcgtgcacagtcccttcttcgattaaccgcccattttccatgaccgcaattcgttggcaaatccgccgcaccgcatccatttcatgggtgacaagaacgattgtaatccccatttcacgattaatcttagccagtaacgttaagattgaattcgttgttttcggatcaagggcgctagtcgcttcatcacataacagaatcttcgggtcactaatcaaggctcgtgcaattgcgacccgttgtttctgaccgcccgatagttcgcttggataggccgcttctaaatgggtcaattcaacaatctttaataatgcgcgggctttgatttgtcgttctgccttaggtaccccggctaattttagtggcaacatgatgttttctaacaccgtctttgaccagagtaagttaaagtgttggaaaatcatgccaattttctgccgaatcggccgcattgcttgttcgctcaaccccacaattgactggccctcaacgagcacatccccagtcgttggcttttcaagtccattcaagagtcggatcaacgtactcttaccagcgccggaataaccgataatcccgtagatttcgcccgcttcaatgttcaacgagacatccgttagtgcggcgaatgttttttgttctcgctcaaaggttttacccacttgttttaatgtcaacatactaatcgctccctcttcttttaaaaaatgccaaaaaaaaatccttcctctcaaataaatgagagaaaggacgctaaatgcgtgttaccaccttaatttacgattacctcacagtaatcgccttacaaagtacccgattgatactcgttcgctatatcgggcaacccccgcattcggctcagttaaaccttaccaaatgaattgctcaaagaccatattcatctagctttcacattatccgcttgcacctgaccggactctcttaaaatgctactgactaaattactcatcttttcatcgcttgtattaagtagtacctatcataattaaagttcaattaaaagtcaagcaagactattcaaaaaaatcagattattgtttaagtaatggcctaatcgacccgaatgtcagcaatccacgcatctttttcgttatctgcatttaataattccggattatcagctaacggtgtgttgacgtttactaattcaccagctagtggactgtcaagatcttgtaccatcttctcagcttcaatggccactaaggtttcattagccgtcaatttttgccccacgattggaacatcaacaaacttgattaacccaaactcattttgtgcggctttggtgatcccaattcttctaatcgatgctgcaatttcctctgtccaaaaataatcattattattcatcgtcatccgtcattcactcctagaaagtatcttcagcttcactgaacatgtaactcttataatggtaccgcatcgacatgataaacccaacgccaattaggttccccaataatgacgagcccccttgtgagatgaacggcaatggaatccctgtcaatggtaataaaccaacgctcatcccaatgttttcgaaaacatggaataagatcatcatgatgaccccagttgagacatacgcgtaaaattcattcttcgtatcaaatgtgacccgaatcatttggtaaatcaacaagaagtacaaaagaatcacaaaacatgaaccgacaaagccgaagttctcaccaatgacagagaaaatcatatcggattcacgtactggcacatggacttgcacttgattgaagcctttcccaaatagctgaccagacccaatcgcttttaaactctgcgataattgtaaactggtactggcagtattatcaaaaggatgcagccaagcatcaattcgattgaattggtacgttttaaagcccagatgcgtcaagattacccggccaggggtcgtcgccgctagtgtaagggccgtgcccccaacagcgactaagacagcaatggctggggctaaaatcttccaggtcacacctgagacaagcacaatcccacctaagatggcaacgaacactaataaggtcccaaagtcattttgtaatttcaataggaccatcactggaagtgtccatagtaacattcgtccaagtaacatccaatccgtcttaatcgtgtgttctggataagccgtattgtgttgagtaacgaccctgcccaacatcaaaatatatgccggtttcatgacttcagatggttgaaatgagattggtccaagagagaaccaactctttgccccagtttgcaaggcgactgcccgattataaaagattaaaacggcaatcaagaggaaaatccctaacccataagccagtggtgcaatccgccatagttgttctgaatcaaactgcataattgcgacaatcgcaattccaccaatcacgtaccatgcagcttgcataataacggctcgagttgaactcgcacctgatgtatcatgtgatgttgccacatagattgacatcaagccaatcaacgctagcataaagactgaaaagacgattccataatcaactcgcgaggaatcttctgttgtttctacttcctttggcatgctaagtctccttcaatcaattctgctctcattatataaataacccggccagaattctgccgggttactgtaattctaattaattcttaagaattaaccttggtgtaagtggtactcccgtagtaattcgttaactgcatcgtcgtgggtcttagtaatgatactttgaccagtcccttcaacagttgcttcaaaacgtttcttagcgctatcttctacaatcacgccaatttcatttttgccgaccatgacgcttgtcatttcttggccattacgtttgatgtcatcaattgtgacagtaattttttgttctttttttgacatagttatgttgaacccctaacttctttgacttacttttgtgactcgtcttgctgtcgattacgcaaaacggtgaaatgatctggtactggatcatagccgccccgtacaaacgggtgacaacgcaatatacgaccgatgcccatgattaaacccaaaatagcaccatgtttttggattgcttgaatcatgtaactcgaacatgttgggtaatatcggcaactcggtggtaataatggtgaaattcccttctgatagaaacggaccaatccaatcaatattttccgcaatttatctgcctcactttagcgcatgctactgcaagaaattaataatatgactccatgtactaggcaagaaaacggcaaatggattctggccgccaattgcaaaaccaatcatctgaccaactaataacgcaataattatgagcacgaaaaccaataaaattttctttaaaacgggtttgacgtgttcgtcaaaatttgattgatacacacaatcacaatccttctttaatagaatgcggcttaataagcgcgtttatgttcaatattatctaataagatgccagtccctaaagcaacagcatccaatggattttctgctaagaccaccggaaccttcaaatgttctgagaataagctagcgatattgcgtaataaagcaccgccacccgttaacatgattccccgatcaataatatctgcagataattctggtggtgtcacttctaacacttctttggcagccgcaataatttccatcattgtttcatgcaaggctgattcaacttcatctgcactaattgagacagattgtggcaacccacttaccatgtcccggccacgaatctcaagtgactcactcgcatcagcatgccaaacgttaccaattgttaacttaattgtttcagccgtatgttcgccgattaatagattatgtttcttcttaacgtatgcggcaatttcactattcatcttatcgcctgcaagacgcaatgaacgacttgtgaccacttcacccattgaaagcacagcgacgtcactggtcccaccaccgatatcaataaccatgttaccgcgtggttgaaaaatatccatgccagcacctacagccgcgacttttggttctaattccaagaagactttgccgccacctgatttttcagcagcttcaacaattgctttttgttcaattgatgtaatatttgttgggcagcaaatcaaaatattaggttttgataggaagccctttacatttaatttattaataaaatacgctaacatttcttctgtaatgtcgaaatcagcgatgaccccatcctttaatggacggacagcgtggatattgccaggtgtccggccaaccatccgatacgcttctgagccaactgctaaaacttttttggtttgggtatcaatcgcaacaactgaaggttcgtttaagacaatgccttttcccttaacgttaattaagacgttggcagttcccaagtcaatcccgatatctttagccatttggtgttgctccttccgagaactatattcagtaaatcattataccataagacaggtacctttagtatcctgatttggcaaaataaaaaagcgacgtccgctgaaatagcaggcgccgccagtctgttttatgcacgttttgcttgtttaatccggtgaccggcagcatcaaaatcagctcgactaatatgtgccccaagtgcccgtaatttttgatggaaatgatagtaaccccggtccatgtattgaaggttcgtaaccaacgtttcaccattagctactaacccagcaatgacaagtgctgcggcagctcttaaatcggttgcagccacttcagccccattgaaatgtgtatcgccataaagcacaactgattgaccttcaatttgataatccgcattcattcggcggagttcttccaaatgcatgaaacgattttcaaataccgtttcggtcataacactcgtcttcttagcaagtaattgaagtgtcgtcatttgtgcttgcatatcagttggaaagcctggataaggtagcgtcttgatattacatgcctttaattcagcgggaccaataattcgaacaccagcttcttcgtcaatcacttccgcacccatttccactaattttgataggagtggtttattgtgttcagcaatcgcttctttaatcaagacatttccttgtgttgccgcagcggctaccatgaaggttccggcttcaatccgatcttgcacgatactgtgatccgtcccgtgtaaagcggttacgccttccacccgaattgtctcagttccggcgccaaaaacgttcgcacccatcttgtttaagacattagcaagatccacaatttcaggttcacgagcaacgttttcaatcaccgttgtcccttcagccattgtcgcagccatcacgatgttttgtgtcgcaccaacactaggaaaatctaagtaaatattagttcccactaggcgttctgctttagcttcaatgtaaccatgattttgatgaatggttgcaccaagtgcttcaaaacccttcaaatgtaaatcaacaggccgcgaaccgatagcacaaccacctggcatcgcaactcgtgcgtgacctaagcgcgctaataacggccccatcacaacgatggaagcacgcatttttgaaacatattcaaaagctgcttcaaaattcaaatcaccactggcatcgattgttaattggttccgttgttcatcaaactcaactttagcatctaaactctttaatacatcttgcatcatgaagacatcagataaaataggaacgttcgttaattgaacgggtccgtcggttgctagtaaggcagccgccataattggtaatactgcgtttttggcgccttcgatttgaacttcgccaactaatcgttgaccgccttgtataatcaatttttccaagagtttccctccgaataagactgctagtttatgggactaaaaaaatcacatttttagcctgcgcgattatttctaaaaagaattggctaacggtgtagcccatcacaatagcgagaaatactatgacaatctgtacttgacggatatgattcggtttgaaaaattgctcaaaccggattgattgtaagccataaaaactgattaaaataaaaccaatatggctaataattgaaataactgcctgtaacccgattgattgcacttaaataacgccccttttgtgatatgcaaacattgtaacataccgaaataggatttgtctgcccaccagactgaatcttaagaaacaaaaaaagccttaaaccattcaggtttaaggctttttgaatcctacaataagtgattcttaacgttaatccggtttatcgcacgttgcagtgcaatttgagcccggcgtaattcgtcagtatcattatgttcggacgctgttttaattgcgttttgagcacgttccttggcactttgcgcacgcctaatatcaatatcacgcgcccgttcagcactatcggcaacgattgaagcaacgttatggctcacttccatgaacccaccattgaccgcaattgcgtcttcacgtgctggatcatcagtccgtttaacgcgaatctcaccaatttctaaaggggtaataattggctcatgattagccataataccaagttgcccggccatcgctggtacaaccaacaatgttgcgtggtgatcatagacaatcccacttggggtcacgatattaacggttaataccttttgttcttctgccatcattaacgcccctttctaagcttgtttcgtttcttgttcggatggtgtataacccaattctttagcttttgctaatgcagcatcaatattcccgacaagccggaatgcttcttcagggacatcatcatagtcacccgctaagatgcctttgaagcctgccactgtatcttttactggcacgtatgagccggcttggcctgtgaaggcttcggcaacgtggaagttttgtgataagaagaattgaatccgacgagcacgcgcaacgataatcttttcatcatcagataattcatccatccctaagatcgagatgatatcttgtaattcacgataccgttgtaagacgtgttgcacttctgaagcaacttcgtaatgttcttcgccaacaatttctggatccaaagcactagaagttgattctagtgggttaacagcaggataaatcccctgttgtgttaatttacgatccaagttagttgtagcatccaaatgcgcgaaagttgttgcaggcgcaggatcagtataatcatcagcaggcacataaatggcttggattgatgtaactgaaccttttttagtagacgtgattcgttcttgcaattggcccatttctgttgccaatgttggttggtaaccaacggcagaaggcatccgtcctaataaggcagaaacttctgaaccagcttgagtgaatcggaaaatgttatcgatgaacaataacacatcttggccttcaacatcacgaaagtattcagcaattgttaaaccagtcaaggcaactcgcatacgagcgccaggtgattcattcatttgaccgaaaaccatcgctgtcttttccaaaacgcctgattctttcatttcaaagtataagtcattaccttcacgtgttcgttcaccaacaccagtaaagacagaaataccaccatgttcttcagcgatattatggattaattcttggattaaaacggttttaccaacaccggcaccaccaaacaaaccaattttcccacctcgtaaataaggggcaagtaaatcgataaccttaatccctgtttcaagaatttctgaacttgtatttaattcctcaaatttaggtgcagaacggtggatactgtcccgtctaaaatctgcaggaaattcttcgccgccatcgattgtttcaccaagaacgttaaatacccgtcctaaagtttctttaccaactggtacgttaattgcacgaccagtgtcttcaacagccatcccccgacgtaaaccgtcagttgattccattgaaatagtacgcattaccccatcacctaattcaagtgccacttctaagacgacagattcgtcgttccctttgttgacaaccaaggcattattgatatctggtaaagtcgtatctaaagaaaattcgacatcgacaacgggaccaataacttggacaacttttcccatactcatagttgttattttcctcccgcgtttcttattctaatgctgccgcaccaccgacaatttcggtgatttctgtagtaatctgtgcttgacgtgcccggttaaatttaattgataaatcagaaattaaattattagcattatcagtggcactcttcatcgccgtcatggaagcagaatgttcagctgttttagaatcaagtagtgcgccgtaaatcaaactttcagcgtattgcggtagaatggcatctaaggcatcatcaacagaaggttctgtgatgtattcttgatctttatcagtgacttctgaaacatccaagtcggtaataggtagcattttttcagctcgaaaagcagatgtcagtgagttgacatggtggttgtaacaaacgtacaactcgtcaaacacgccgctatcatacattgcaacagctgttttgatgatttcacggacttcattaaatgatggcacatcacttacaccacgatattcgtaggataagttcatttgccgtgctttaaagaaatcagcaccagtgccaccaacggctaaaatagcatattcatcggcagacttgtggttttctgaaatcatttcaaccattgcttttaagattgagctgttataagcgccaaccaatccacgatcactcgtgatgaccaaataaccggtctttttgattggtctttccactaacaaattacttaacgtaatgtcatgccgcaatgatttctgtgaagtaccgttagtagcttctgctgctttagcggtacttttttgacgtgcacttgcaattaattgacttgcagccaaatgcgtgacgatttctcgaatcttattcgtatattgttgataagcgattgaatttttttcaatctgagaaagttttgcaccagagaccatttgcatagcactcgtaatttgcccagtttttttagtagaggcgattcttcgtttgatatccattaaagattcagccaattaattcaccccttactgtcctgagtcttgattgtcagcagtagcttcagcgccgacaaaaccttctgtgaaggatttgatagcagcatctaacttatctgtatctggcaatgcagcggtttgacggatagtgtccatcaagtcctttgcgttactttcaagataatcgctcaattgactttcatattgcatgatatcgtcaactggaacgtcatcaataaagccgtgtgttaatgcataaagaatcgttgtttgttgttcgaatggtaatggtttgtgaagtggttgtttcaaaacttcaacagtccgtttaccacgatttaatttcgcttgtgttgccgcatccaagtctgaaccgaattgcgtaaaggcttcaagttcacggtatgatgaaagatcaagacgtaatgtcccagaaaccttcttcatcgccttcgtttgcgctgcgcccccaacacgagaaacagatgacccagcatcaatcgctggacgtgttcctgaatagaataaatcactttccaagaagatctgaccatcagtgatggaaataacgttagttgggatataagctgagatgtccccagcttgtgtttcgatgattggtaaagcagtcattgaaccgccacctaattcatcacttaacttagcagcccgttccaataaacgtgaatgtaagtagaagatatcaccagggtaagcttcacggcctggaggtcttctcaaaagtaatgaaatttcacgataagcagcagcttgtttacttaaatcatcatagacgattaagacgtgcttgccgttatacatgaattcctcacccatcgctgcaccagcatatggtgcaatgtagagtaatggtgctggttgactaggaccagcttcgacaacgatggtataatccatagcgccgtaacgacgtaaggtttccacttgcgctctaacggtcgattctttttgaccgatcgcaacgtaaatacaaatcatgtcttgatctttttgattaataatcgtatcaatcgccacagatgttttaccagtcttacgatccccgataattaattcacgttgaccacgaccaattgggaccaaagcatcaatggctttcaaacctgtttgtaaaggttctgaaacagattgacgtgccataacgccaggggccttcttttcgattggacgagttttgtccgttttaatttcgcctttgccgtccacgggttgacccaatggattaacaacacgaccaattaaagcatcgccaacaggcacttccataatccggcctgttcgtttaacttggtcaccttcacgaatgttttcatattcacctaagatgataatcccaacatcgttggtttccaagttttgcgcaaccccgtatgaaccgttagaaaattctagcaattcacttgaaagggcgttttctaaaccgtgagcacgtgcaatcccatcaccaacataagtgacagtaccgacttcttcaacggctaaatcttcattataatttgcaagttgttgtttaattaatgcactgatttcctcagttttgatgctcatcaggttcacctctttatcaacgattgactatttcaatagtaatgacttaatttgatctaagccatgtttaacactgccatcgatcaccttgtgattcgattccagtacaatcccaccaataatatctggatcaacgatactttccactaagacctgattgagaccttcgcgtttagcgtagctttggctaatctttacgatttgatcaccatctaaagcaacggctgacgttaccttagcgtgtgcaatccccatcttttgatcataaagatcttcgtaggccgcaataatgtatggcatctcagccattctttgatagtcaaaaacaaggcttaaaaagtgttgcatgagtgtactaaattcaccggaaaggctctttagaagctcacgttgtttcaatccagataaagtcgtatcagtcagaactgcacccaatcttgggttgtcattgaaaatagtctcgagtgcttgtatctcttcatggatactttcaaattgttgctcttgttctgcaagggaaaataatgcctttgcatagcgttgtccgactgcatatttatctagtttcattttgcttgtccaacccttcaatataggaattgatcaatgacttttgatcagtaactgacaattctttcttaatgagtttagaagcaatttcaatagatagttgagcaacatcatctctcacactgtttaacgcatctaaacgagattgttcgatgtcttttttagcattttgttttaaagtttggacttcttcttgagcaagtgtgaccatgccttcgcgttgtttttcaccatttcgcttggctgtattcacaatttcaactgcttctgacttagaattcttcaactctgttgcgcgttgtgctgctaatttggcagcatcttcacgtgattgagcggcgttatctaagtcgtttgtaattttgtcagaacgagcttgcatcatttttgaaacaggtccgaacgcaaatttaccaactaaagcgactaaaatgataaagacaactaatacgaaaagtgaatctccaaggtaggcttcagaagcaccaacgattaaattactaaacatctattgacactccttccttgacttactgactaatttttaaagcgaaaatttagattcactcggattaactaaataagatcaagaaagaaacgacgatagaaagaattggaacagcttcaatcaacccaacaccgataaacattgttgagcgtaattctgctgataattctggttggcgtgccatactttcgattgtttttgagataaccttaccgttaccatatgatgctgcgaatgctgctaaaccagctgcgatagctgctgctaaatagttcatgttttttcctcctaatttttagtcttccatttcaactttttctgaaatatagactatcgataatgttacaaatacatatgcttggattgccccgataaagacggagaatccttgccaaaccatttggatcggtgccgtcacaagcatcgttgctggtccatgtgagaaggccattttaactaataaacttagtaaaacttcacctgcaaaaatgttcccgtacaaacgcaaggacaacgttaagaaattggtaaattgttcgatgatattaattggtaagaaaaatcctaccggtttaatataactcttcatgtaattaccaaaccctaaccgttcaacactaaagtagtgcgcaatcactaagacgatcattgcaagcgacatagtgataatcggattggccgttggactcttcaaccaagttacatcatgtaccttaatttgaagaatcaaaccaagttgattactgataaatacgaacatgaacatgacgaatgcaaataagtaaaattgtttaccttcttcaccgggcatcgcacttttaacgattccgttcgtaaaatcaatgatccactccaaaatattctgccgtttagtcggtttaagcgcaatttttcttgataaaaagaaaacgagtgcaaaaaccaaaactgcacttactaagaccgatagacagtttgctaaattaaaacgaattcccaaaatgctaataatgggatatttatcatccacaaaattccctcctcccttaggcttatttgttgattccactctatcaacgactacgcgagttgcacaacgaacctaaaaacagcaatatttatgtagaaaaattaagcataaatcatcaccgcaatacaagtatgataataccaccattaaattaaaagtacaaagcaaatactaactaatttctaattatttttttgtcaatgcactcaaataccataaatattatcatatcaaaagattaaacttattaacggttgcttttttggcaaaaaaaacgcgtaacacaggaaaatcaagtgttgcgcgcttttattatcggtacctaattaatggctatttagtcccgaaaagacggtcgcccgcatcccctaaaccaggaacaatgtatccatcctcgtttaaatgatcatcaagaccagctgcatagatgtcaacatctggatgggcttcttgaacagctttaacgccttcaggtgcagccactagtacaacaaggcgcattgacgttgcgccgcgttttttaagggcatcgatggccatgattgctgagccaccagttgcaagcattggatcaacgatgaatagttgtcgttgatcgatatctgttggtaatttaacaaagtattcgtggggttgtaatgttttttcgtcacggtacataccaatgtgaccaactttagcggctgggattaattctaaaacgccatcaaccatcccaagacctgcacgcagaattggcacaacggctaattttttcccgctcaattgtttttcaattgcaggccccattggtgtttcaactgctacgtcttccattgctaaatcgcgcgtgatttcataaaccattaattctgcgatttcgtttgcgacttcgcggaaaactttagtacccgtatccttattccggataatcgttaatttgtgttgaattaacggatgatttaatactgtgaattttgccatttactttgcccctattctattcaatgaatttagtccaaatttttttcgcaaaaaaagagtgactccaaagaaaaccttctccgagtcactctcccttccgcgtaaaattctgtttactattgtagcgtaaatagcatcaaaaaactagcggtattcattaattaatctaaaaatttagcttgtgtgattggaaaacgatccgtcaacgctaaaacatctgcactaatgcgcgtcatggcgtctaattgatcgtgtttttcaatcacttctaaaattaattgcgcaatcaattcacaatccgcttctttaaacccgcgcgatgtgattgctggggtcccaattcgaatcccacttgccttaaatggacttaatttttcaaaaggaatggtattcttattaacggtaatgtggacactatctaaaaatgcttggacttccttcccatttaagccactctgcgttaaatcgagtaacattaaatgattgtcagtcccgcctgaaaccacacgtactaagtcagattgttcaaaaacggcagccatcgcttgcgcattggccacaatttgttttgtatatgctgtaaattcaggttgtaaatcttcaccaaatgcaacagctttcgccgcaatgacatgttcgagcggtccaccttgaataccagggaagatggcagagtcaattgctttggcatattctgctttacacaaaatcattccaccacgaggtccacgcaacgttttatgcgttgttgtggtcaccacatcggcatatggtactggacttggatgaacaccagttgccactaaaccagcaatgtgtgccatatcgaccattaaataggcaccgacatgatcggcaatggcgcgtaaccttgggaagtcaattgtccgactgtatgctgatgcccctgcaacaatcattttaggatgaatttcatccgctttagcagcgagcgcatcataatcgattcgttcgttatcgtcagcaacgccataactatagaagtgataaagttgcccactgaagttaaacggtgacccatgggtcaaatgaccgccatctgtgaggttcatccctaaaatcttatcaccgggttctaaaagcgcttggtaaactgccatattagcctgcgaaccggagtgcggttgtacattggcatgttctgcattaaaaagttgtttagcacgttcaatcgcgagtgattcaatttgatcgataaattcacaaccaccgtaaaaccgtttgcccggataaccctcggcatatttattggttaatacgctaccttgtgcttcttgaacagctccggaaacaatgttttcagaagcaattagttcaatattatgcacctggcgttgttcctcttttttaatcaattcgtaaattgctggatcagtttgttcaatcatttacaatcactcctcttcctattaaaatagtgcctatttcgaagtaaagtattgttggccggcagacttctcgaggcgattcatatacgctaatccgacaccctcttttgcgaagccttgcactaatataattttaacctcaggattcaaatcaaaataccgtaatccttcaaacaagtgttgactagcagtcactacagaatcacctaaagagaactgatctttaaacctaacgtcagataactgccctaacaccgtatcaaccgccataacaccaaatggcacattttgttgactggcccatttaaccgccgccggaaattcatctggcgttggcactatgtaaacctgtgcatttggagcatagtgtttgtatttcatgcctggtgcctttggcgtttcagctgcgccaactttatggtggtttgtcataatcggcccaatcacacgttcaatggcttcttgagtcacaacaccgggtcgtaaaataacgggtgtcgcaacacttaaatcaatcaccgttgattccaacccaacaccagttggaccatcatcaatgacaccggcaatctttccatttagatcatgtaaaacgtgatcggcagtggttggactgggcttgcctgatgtattggctgaaggccccacaagtgggacaccggccgctttaatcaagtctaacgtcaccgcattgttcggcattctaaaggcagcggtctttaaaccacccgtcacaactgaatctagtgccgcatgttttagcggcaaaataattgtcaatgaaccgggccaaaaagcgtcgactaattgcttaaatcgatcactaactccggctgcgtaatgctcaaccgtcgcaacacttgctacatgcacgattagcggattatcacttgggcgccccttagcggcataaactttcttaaccgcttcaggattcgtcgcatctgccccaagaccatagacggtctcagttggaaatgaaatcaattcgcccgcttttaaatctgctgctgcttgttcaatctgttctactgtgtatctcttggtttccattataggccttccttactctacttctgatttacatcataccaaattccgattgaaatcgtaacccacacgggccattctagaccaattagccatatcttttttgattgtaaccgctacatcggtcgattcatgttcgaacaaccgaacgatcgcctctttttgctgataaccgaactctaaataaagctgcccatctggttttaaatacgcacgcacttctttagcaaaccgttcataaaacgctaagccgttattatctgcaaatagggccaagtcgggttcgtatttcaaaacggacgcatccatcacatgccgttcatcttgtgcaatatatggcggattagacacaatcacatcaaactgttggcccatcactggggttagaaaatcacccacgataaagttaacatgcgcgtttaattggcgcgcatttgcttgtgcaacagcaatcgcttctagtgaaatatcaattgcggtcacttcccattctggatgctcacaggcaagggtaattgcaatggcgcccgttcctgtcccaacatccaacactttaagtggtcggttctttggttgtgtagcatctaatatccattctaccaattcttccgtctcaagtcgtggaataagcgttgccggcgtcaccttaaaatcgcgtccgtaaaaattagcatatcccaaaatgtattgtgccggttgatcagcgataaacgcgtttaagtctgcttgatactgatcgtattcggcagtcggcatttcatcgtgataatgcaagaccagttgggtcgtcgtccaatgtttacgaccgagtagtaaaaagcgcgctgcttcacgttctttagcgtgttcttctaaaaataaaaaagcccaattcagggctttaagataagtgagctgtgccatcttgtaattgctccaatttttcggtttgatcgtaaagaattaacgcatcaatgacgtcgcctaattccccgttcataatccgatctaatttgtttaacgttaaaccaattcgatgatccgtcactcggttttgtggatagttatatgttctaatccgttcagaacgatccccagacccaaccgctgacttccggcttgaatcgtattcactttgattttgtgattcatagaaatcataaacccgtgactgtaagatttgcattgccttcactcggttttgttgttgtgaccgttgatcttgcatcgcaaccacaatcccggttggaatatgcgtcatccgcacggctgaagaggttttattgatatgttgaccaccagcacctgaggcacgataaacgtcagtccgaatatccttaggatcgagctgcacgtcaaccccatcatattcaggcataactgcaacagtcgctgttgaggtatgaacacgaccttgtgattcggtctttgggatccgttggacacggtgcgcaccattttcatattttaacttcgaataaacatttttaccggtaatcatcatcgcaacttctttgaagccacccacttctgtagccgtttcatcgatgatttcagtttgccagttttgtgattcagcgtagcgttgatacatattcaacaaatcacctgcaaagagactggcttcgtcgccaccagcagccccacgaatttccatgatgatattcttttcatcgttaggatccgttggtaacatcaaaatcttgatgtcttgttctaattgttccttttcatcttgtaactcacttaaatccgctttagctaattcttccatttctgggtcattagattcgcgtaacaattcttcgctttctgcaatgtcgtttaagacagtcttcaaacgcgtgtatttaccaacaatttcccgtaaacccgcttcttctttagacaattccatataccgactggtttcgttgatcacttctggatcagacattaattcctgtaattccgcatagcggtctaacaaactatcaagttgttcaaacattttatccatgaatgactagccttccttttcactctcttgtgttaccggtgggttaaaatagtgtttccgacaaacggggtagtatgcttcgttgcccccgatttgaatctgttcacccgtataaaccggtttgccatcgttcattcgcaagttcataatcgcttttttgcgacagaaccaacagatggtcttcatttcttcaatcttattggcaaatagcaataagtatttcgagccttcgaataattcattcttaaaatcattcttcaacccaaacgccatcaccgggatattcaaatcatcaacgacctgcgccgcttcgattacgtgatgccgttctaaaaattgtgattcatcaatcaagacacacgctgcatccggattagtcgattgtaccaactcaaagatattcgtatccgagaaaatcggtgtcgcctcacgtttgagcccaatccgacttgaaacaatccccaccccgtcgcgattatcaatcccactcgtcaggatgatcactgatttattctgctcttcataattgtgtgcgacttttaaaatttcaatcgacttaccactattcattgcaccatatctaaaaaataattgcgccactctcaaacacccctatgttaagcacattttaatctagtatacctgaaaatcagcgaggcaacaatattcgccactattaaattctaaagtttcccttattttatttgcagatgcgtttttatatcgtccaaattgagaatttatgctatgattatgaacattgaaagggtggcaagcatgacaattaaaagctcatttgcaattacagcaggacgtttttcatattggtatttacatacctttatgaaaggtggcagctccctccccgggaaaatcgcaaccaagttcgatcctgctgtgttaaagcagttaaccaagaactacgacgtgattatcattaccggtaccaatggtaaaacattaacgaccgcactcactgtgcagacgttgaagcaaaaatacgatcatatcatgaccaattcgagtggctcgaacatgatgcaagggttgaccaccgcctttttagcagatcatcctcaaaaaggacaacggcaattggccgtcctcgaagtcgatgaagccaatgtggaacccctttgtcactacatcaagcccaaagcgattgtgatgacgaatattttccgtgatcagatggatcgtttcggcgaaatctacacgacttataatatgattctagcgggcgtcgaactcgttcctgaggcaaccctcattatgaacgctgacttgcctctcttttcatcggttgaacttcctaatccaaagatttattacggattcaaccacttaccagatggcgaaatgatggctccaagcaacacagacggcgttttgtgccccgtttgtgatcacatcattcattacaaattcatcagttatgccagccaagggaagttttactgccctaattgtggctaccaacgacctgaattagacgaagcagtcactgccatcaatcagatgcaccccacaaattcacactttgaaattaacaacgaaccgtttgaaatttcaattggcggcatgtacaacatctataacgcacttgcagcctatagtgtcggtcgattctttgatattccagtgaaagcaattcaaaaggccttcactgaagacaaacgaatctttggccgtcaagaagtcattcaattaaaagacaaagcggtcacattggtactcgttaaaaatccggttggcttaaaccaagtcttacaaatgatcagttctgatccagaagacttttcactcgcaatgttgcttaatgctaactatgccgatggaattgatacgagttggatttgggatggcgagtttgaagacttactcaaacacaacattccaaccgtgattaccggtggcgaacgcggtgacgatatcgctttccggctaaaagtagccggtgtcacggcagatcaattacacgaaaccaaagaactcgatgcaacgatggcagccattgaagcagccccaaccaaacatgtttatgtattagcaacttataccgctgttttacaactacgtaagaagctggcagctgccaattatattaagaaaggactatcagtatgacccagacattaagaatttgtcatctatacggcaatttaatgaacacatatggtgatcttggtaatattttagtccttgattactatgccaaaaaagttggcattcaaactgaaacagaagtcattagtatcggtcaagatttcgatgcaagtcgttacgatatcgttctcttcggcggtggccaagacttcgaacaaaaaatcatctcagaagacctcaacgacaaaaaagcagccctcaccgaatacattgaaaacggtggtgttatgcttgccatctgtggtggttatcaattattaggtcactactatattggcgcaaacggcgacaagattcctggaatcggcgcacttgatcattacacattgagccaagataacaatcgttttatcggtgatattgtcatcgaaaaccgtgagtttaacgaaacctacctcggttttgaaaatcacaacggccggactttcttgggcaaggatgaaaaaccacttggttacatcaaacgtggtcacggcaacaatggtgatgacggcaccgaaggttgtgtttataaaaacacatttggttcatacttccatggtccaattctcacgcacaacggtgttttagccaaacgacttttatcgattgcggttagccggcgttttccagaatttgatttacaacaaatcgctgacttaccactcgaagaatcacgttaccaagtcgatgcagccggcgtcaaacgcgtccaaaattaacaaatcaaaaagtcgaccattatgcggtcgacttttttgatgtcttaatcatttcgcaagaaaaaatacactttttattcataaaatgataatcgtttcacaatacttgctcggtatactgactttaacctataaaaaggagcgaatcattatgttaaatcaaatgccagcagtcgagtccgttcaaattaatcggattgaaaatcatgataaagttttcgcaaccactgaaagtggtcaagaaatcgaattacatattaccgaccaacaaaaaaaggaccgcctcttctggaaatccctcatcaatatcctccgcgctgaattgtggttacccctgcaaaagagaacccacgaactactccaaaacgactggctaacggtcgatggctagcgtgtggctctgggttcggatgacttacagaacacgtttaaacgatcagaacacaactatccaaaagggcgctaacaaaaatattgttaccgcccttttgcatatcaatgtttcgttttttagcgttgccctgtccactccgctaaatactgatccacaaactggtgcatgaaatccgttcgcgcttgcgcgatttcgcgcgctgcctgtgtgttcatcgttgctgccaatttaaataatttctcataaaaatggttaatcacggtagacggttcgcgatagttttcctttgtcaattccgcccgtggttgaatctcaggatcataagcaaccccatcgtgtgcgccaccatacatgaaggtccgcccaatcccaatcgcgccgattgcctctaaccgatccgcatcttgaacgatttgcccttctaaacttagcgtttggtgttgattgagatttttcgaaaaggacatgtggtcgataatatcaaaaattgccgtttgttggccatcttgtatgccgttttcggttagtttagtttttaccttttgtcgagcctgttcaacatcagtcgcgattttttcatcaatcacatcatgcaataaggccgccaagataatcgttgttaggtccgcagctaactctttttgctgaattaaacgggcattattcacgacccgttgaatgtgatcgaatccatgaccgctgtgttctgctgccaattccgttcgtacaaattgttcaattgcttcgatttgtctttgcatacttgtcatcctactcttttaatcattaaaaaaaattgcaaccacggctgcggttgcaattggttatattcagtttacttgttacccggttctgacgcaataatttgcatgtcaccttttaagtcccatgacttaatatcaaatggtaacacaaaatgcatattcttgtgaattgggtaagtttgcccatcggtaatcagttcgccttcaccatcgaccacggagactaaagtatagggtgccgttgtccgatcaaagtgtaagtcgcccttcactaaccattggtaaacactgaaaaatggtgacattggtggttgcacataagtcgtgattgttgaatctccaacatgttctgtttgaatattcaaaacgggatcttgatgcggcacaatcgtcgtatcaattgattgcttcaagtgtagttcgcgtttttcgcccgtcttagcatcaacccgatcataatcgtataaccgatatgttgtatcactactttgttgggtttcaagcgccataatccctttgttcaatgcgtgaatcgtgccacttgggacgtagaaaaagtcaccagtcttaacgggcactttgcggagtaaatcatcccacttgcctgcttcaatcattgctgttaattccgctttggtcttggcatggtggccatagattaaataagcacctggttcagcatccaaaatataccaacattccgtcttaccgagttcggttggaccttcatgagcagcagcataagcgtcatctgggtgcacttggacagaaagacttgcttcagcatccaaaatcttagttaacaatgggaatactttaccttctgcattaccgaaatattcgcggtgggttgcccatgcttgatctaatgtgagcccttttaatgggccattttcgatggtactaggaccatggggatgggctgaaatggcccaacattcaccaatatcgccgtctggtaaatcataatcgaaggcttcagctaatttgcgaccaccccaaattttttcttgaaaaacaggttttagaaataaaggttccgtcaattcactcactcctaatgcgctttatttatcaatagtcccattttaccacaaatgtaagcggataatacgcaaatttgcgaatttgactaggcttttgtttctaggtgattatccgctaaaaattgtgccacaatcgcatctcgtcgttccaaaaagaccggattatcagccgttggatgaatgcgattactcaggacaatcagccccgtttgccgcttgcgatccaatagcatgaacgtgccggtaaaaccggtgtgataaatcagtggctggtgttcttgcggctcaaagcgcaaatcccagcccagtgagcgcccgagatgttttggtgtccaatcacgatagagactcttaacactcgcctgactgattggtggctgttcaaccttcaactgccctaattggaactgggcaaagcggacaacgtcttttaatggggcaaacaagccggctgcaccactatgattttgtaaaatcgcacttttcggatcgtggaccgtgccttggattaagccgcgttcggcactcaattcagtcgggaccgccaaacttttgtccggattaaacgtactggcttgcataccgagtggggttaaaacgagttcttgaatcaaatcctgaatcggtttttgatagatggcttcaatcatccagcccaaatacaacataccaatgtccgtgtaaacaaccttttcaccaaaatttgggccgaccgttaattgcgtcaaaagcgccgtttttaattcggcagccgataattgattccgattcggaatgtagcctgttaaaccggacgtgtgcgtcaatagatgcaagaccgtcacccgtcgatctttaaaggccggcaacaaactatgcacttttgttcgtaaagaaagccgccctttttccaatagccgtaaaataatggtcgtcgtcccaatcactttcgttaatgacgctaaatcatacaactgatcagcttttaacggcactttttggggcactaattcggcctgcccgattacattagtcatcacttcagggccttcgatgatggcataagaaacaccagggacaatcccttcatcaactagcgcttcaatttgccggatggtttgttcaaatcgcatgttaaattcctcctactacatcaatatcactagtatacgccaaacacggacaaaaataaggccgcagattttatctgcggccttatttgcgtcattcacgcttaaattttaacgttgcctgagaattgactattgtacaagtcagcgtagaaaccatcttgtgccatcaaactatcatgagtcccggtttcaataatcgaaccgtgattcatcacgatgatgttatcggcatcgcgaatcgtcgataaacgatgggcaaccacgaaactggtccgattttgcaacaagcgttccatggcgtgttgaatatgaatttcagtccgtgtatccactgaactggttgcttcatccaaaatcaaaatctctggatcggcaacaaaggcccgcgcaatcgtcaataattggcgttgaccttgggagatattcgaagcttcttcattcaagaccgtctcatagccatcaggtaattgacggacaaaaccgtcaacgtgcgctgctttggcggctgctaaaatggcttcatctgaagcatcagcgttcccatatttcaaattatcccaaatcgttccagtaaataaccaagtatcttgtaaaaccatcgcgaagtgacgccgtaattgttcccgagtcatatcgcgcgtatcgacacctttaagcttgattgaaccgccactcacgtcgtagaagcgttccaacaagttaatgatggttgttttaccagcacctgttgggccgacaatcgcaatcatttgacctggtttgacttgcaagttgtaatccttcatcaagatatctttaccttgataaccgaattcgacatgttctaattcaagtagattttggtcatcaacaatcgctggcacttctgatgggtcgtcactcatgtcatcttcatctaagacttcaaagacccgttcagctgaggcaatcgttgattggattgtattcgctaagttggccaattgcgtgattggttgtgagaattgttgcgtatattgcatgaacgcttgcatatcccctaaagtaacttggccgtgagaaacacgaatccccccaacaattgctacgaagacgtaaccaatgttattgacgaacgtcattaacggcatgatgactccagaaataaattgtgccttccaagctgctttatagagtaatgcattttgttcttcaaaggcatcaattgtgacttgttcgcggttgaaggtctttaagaccacttgaccagagaaattttcttcaatttggttgttcaacaaccccaaacttttttgttgcgctgcgaagaatttctgtgatttcggtgcgacaatcccgacgacgactaaactgagtggaatcgtgactaaggcaattaaagtcaattgccaactaatcgagagcatcatccacataacgccaataaatgtcacagcactggttaccatttgcgttaaactttgttgcaaggtacttgcaatgttgtccatatcattaatcgcacgactcatgatatcgccgtttgagtgtgtgtcgtagtaattaatcggtacccgttgcatcttgtcttttaattctttccgtaattcatagacggtttgttgggaaatccgcgtcatgatgaattgttgtaagaaactgaaaaccgctgatgctaagtacatcaaaatcaccgtcataataatgtgttgaatcttatcgaaatcaattggtaagccattcatcggcatgcccgctttttgcatggcattgcccttcataacacccttgaagatttcggtcgttgcttgtcctaatacttttggtgttctaatttggaaaataacggagatgattgctaaggctaacacaatcactaatccgattaaccggctagacatgtaggttaataatcgtttggttgtgccccaaaaattcttcggtttttcaacgacaccacccatgccacggcctgggccatgtccaccttggggtcgattggttgttgttttttcagccattagtcttcatccccctctctgatttgtgagttaataatttcttgatatgtggcgttattagccttcaattcagcatgtgagcctttaccgaccagctggccttcatccaagaccaagatggtgtcggcatcggcaacggttgatacccgttgaccaacaatcacaacgacactcttttgaatttcagcatcttcttttaaggctttccgtaataaggcatccgtcttaaagtccaacgctgagaaagaatcatcaaagacataaacagccgcttttttaaccaacgcccgtgcgatggcaagccgttgacgttgaccaccagagaagttgcccccaccttgttcaacgtgactatctaagccaccttcaagttcgctgacgaaatctttagattgtgcaatttcaagtgcgtgccagatttcatcatcggtcgcattcggattcccatattgcatattttcccgaatcgtcccggtaaataagttcgctttttgagggacaaatgcaacttgttggtgaatgtcatggagggtcacatctttcacgtttaaccctttgactgtcacttcacccgtttcaacatcgtaaaaacgaggaatcaagttgactaacgtggtcttccctgagccagtgcctccaatcacggcgactgtttggcccgctgtcatttggaaatcaacgttttcaagcgctaagtgttccgcattttgataacggaagttgacctggttgaaagccaagcttgctggttgatcaccaaacgttttaggcgtcgctggatcttcaatcggcgtgtgtaaatcaagcacttcattaatccgcactgctgaagcttgcgcccgcgggataaagacgaagaccattgaaagcatcatgaaactcatgaggatttgcatcgcataagtcacgaacgctaataaattcccgacttgcattgcttgattggcgattaagtgtccacccatccaagtaatcgcaatgttagtcccactcatgattaacgtcatggctgggaacatcactgacataatactataaactttcttcgcattttgcgtgtagtcagtattagcttcatcaaaacgttcttgttcgaacttgtcgcgccggaatgctcgaatgacccgaaccccggttaaaccttcccggaaaactaagttaatccggtctgtctttttctgcattgccttgaataatggcacagcgaagtacatcaccccaccaatgaagagtgccatgattggtaagacaaccaagaaaatggatgtaagttgcgcatctttttgatacgctaagaaacttgcgccaatcaacatgataggtgccataatcatcatccgtaagaacatcattgccacattttgaatctgcaccacatcgttagtcgtccgcgtaattagtgaagacgtcccaacttgatccatttcatcgtgtgagaagttgatgaccttccggtagatatctgaacgtaatttttggcctaagccttgtgacgtccgtgccgcaagataaacgttgcagacggccgcgataatactaattaatgaaaaacctaacattttaaagcctgcttgccagatataatcaatattccccttagcaatcccgtcattgacaatgtcggaggttaaattgggtaaataaaggttactgacaacctgaatcgtcatgaataaaaccgcaccaaagacggcccaacctgacattcttttctttgcaagtttaagcatgttgtgtgtcccttctttccttatccttgtttgctggcccctgtttctaaccagcctaatactaattcgaagcgttcttggacctgttcaattgtaatcgcatggtcactttcttgttgcagataatacgctgcaatactttgaaagaccgtcgtcatcaactcatgaaataaaattctaagcgcttcgggttgatctgcgttaatcttgagcaagtcgtaattgacgttttcttctaaaaagcgcatcccatctacttgtttggcatgcattaattctggtgacatcttgcgctggttcttataatccatatgtaagaagaggtgcttgtaaaattgtgcattttcaccattaataatctcttctaccatttcagcaaagaattggcgaattgccttgaatagatcaccatgaacagccaacagactcttttctaaatcctgctttgaactgtcgcgtaataagctaaggtcgtagaaaaaaatatccgccttatcttcaaagtactgataaaaactgcctcgcggaatctccgccgttttaataatgttgctgacagatgcttcattaaacggtacccgtgaaaactcagcatgcgcagcttgaatcagtcgttgttgcttttcctcaggtaatctaaaaaatgttttcttcggcatttcgatactcctttctgaaaattaatgacagagcgtcataattgtgacgtaatgtcataatacgccaacttaggcactcatgcaagcattaaatccacaaaaaaagaaccggcaggctatcgtctgccggttccctttaaaaggcgctatttatcgtctttgtccattttttctttaatatcatccatcacgtcattggctttttcagcaactttgtctttggcatccgctaatttttctttagcttcacccataaagccctttgctttacctttggcctcagtttcgcgatcaccagtcaccttaccggctgtttcttgtactttaccggttacttggtctttcatgccatctaacttttctttatctgtcattcaaaatcactccttcttattggtctacctatatgataggatagctaaccaacattagtcaaaatttatgattatgagtcgcattatgtcagtttaccatcgcgcatcacgtattgatgatctgtataatccaagacgcgttcatcatgggaaaccatcacaatcgtctgtcctgtctctttcgtgattttagccagctgctcagcaacctgtaaggcccgtttactatctaaactagcggttggttcatccgcaaaaatcaaatctggctgaccatacaatgcccgagcaatcgcaactcgttgacgctgaccaccagataagctcgttgggtactgacgtcgttgatcccaaacacctaaattggttaatagttgttcagctgattgtggcgcttgcttttcacgtaatcgatcgactagttcgaattgttcttcaaccgttaaaaatggaaccagattcgaactttgtaatataaagccgaaatcgttaaaccgtaatgcagaccgctgtttttcgcttaattgactaatctcttgatctttaaaaaagagcttcccactcgttgggccttgtaaactacccataatcgttaataaggtcgtcttcccagaaccagatggtccggttaaaccaatgaactggcccttttcaatcgttaaatcgatttgatctaaagccgtggtttgctggtcgcctgcgccaaattttttgacgattttttctaaacgcattaaagccatcctatgcccctccaatcgcatcaagcggatcaatctttagaatccgccaaattgagaataaagcgccaatgactgtcatcacaagtaaaacagcagaaaaggccccaattagtaaaggattatttgtatacggcaccgccgctggtaataccaatgttgtcaatgcgttacacaacaaaccaaggccaatcccaatcacccctaagaatacagattgccacattaaactaccaactaattggccacctgaaatcccttgtgctcgcataaccccgtatacggccgttttttcaatagtaataatatacatgaaaatcccaacgataaaggcgacgatgactagcaatgcgccaatcatcaaaccaaacgtcttaacctgtggcccataccccggaatcttatcgattaattctggaattgtcagtttggtcagctgatccgttgtcttaatccgcgcgtttccctttaatactaaagcattaatgcgcgtaatctgatcagtgccgtagcgcattcggctaaaatcggtcaaccgcaaataagtcaccggttgcgtattatagcggtggttcgtcgtaatcccaacaattttgtacttttgttgacgcccattcaatttaatttgttgatttaaagcaattccttgtaagccgtcgtcgaccacaatctcatttgcctttttaggataccgtcctttttgcaacttaggcttcaaaaaaacatcaaaatcgataccaaaaacactcgtattttgcttacttaaacctgaaccactcacaacacccatcatctgagcaagttgcgcatgatttttctgtgcacctttaatagagggtaattgatcaacatctaattcagaagcagccaagtttttattcgcatactgactaataacaacttctttggcgtgccattgatcaattgccgaacggttattattggctagcccatatgccaaccccgttaaaaaatagattaaatatgcaattagaaaaatcgtaaaaatgatcaatgaataacgtaatttagcatgtttaatttctttaattgctaaatacatccaaacacccctttcttaactgttttaatctaacataaagcatcgtgccttgaacagcaatccgcattcaatcttttattcattcacgggaatatgctatgataagcacacggaggtggcgcttatcaaacacgttaaacatgggattgcctttttgcttctgattatcatccaacaagttcctttaatgattgtcagtggcttaacattgctccctaaggctcaacagacaacccatctaattttagtctttggttggctttttctaatcacaactatcggcattactgccctgatgtggtattactaccaaaaaattaaatcaacgcgttatgaccaacccttcaccaaacagacttggtggacaatgttgattggctttatcgcgatggttgctgtcaataacggtacaatcccgtttatgcatactaccggtaatgccaatgttgatgcactaacctcagtctttcagacgattggtattttcatgctaccatacgccctattcttaggtccgattatggaggaattacttttcagagggttcctaatgaattggtttttcccaggcacaccaatcatctcaatcgggttaagtgctatcttattcggattgatgcacggcgcaactgatccgatttatttcatttcaaaagcactgcttggcctaattctggctatcgtctactatcgcacctataatattaagagtaatattgccttacacatgttgaataacattactgctggctttacgattttttaaacgactagaaaggaagcatgactatgtctgcattaacaaccatcttaacttacatccaagaacatcctgatgaagtggttctagaaccgtttcaatatgcgaacgtgattcgctttggcattagtgaccaagtcgatctgccagatgccgagaaactgttccctgatatgcggctacacgttaaccggattgaccccgagtacgtcaaagaacaccatgacttattgacgactttttatcaacaaaccgaagaaaaacaaaaagacggcttccaagatgtgtggattactaccgcccatcttagtgaccgtcaactttatttagtggatctttcttttgaataagcctcattttgaacagctaaaggtcagctgtattaagtatgctattttaaccttgtttctctttgtcatgcgtgcctttattgcgcatcccatcattctgattgccagttggattagcactgctgtttgcggcgcatatttcattgccatgttaattgtttattattacggctaacgttgcatatgtttggtctcagcaatcacttcttctgtaaaatacaattgaaaaccaaagaacaccgtcaacataatcgcagctatccatgcagtgcgcacattgattaacttaacaattaaccctgagctaatagtaccaatgaagaagctaccaacaattaacccgaagtaccgggctttttgttggtagtttttttctttggtcgctaaatatagataagtattttcaattaatttcttataattgccggtcgtaaaagcattcgcatatggatagccattaaccgttgaataactcgctaattgcatggccatcgacatcgacagaatcggtgtcacaaacatgttgggaatcgcggttgataaaaaaccaactactactaaagcaataatttgaaaccctaataaccacaaccgccaaacattcaacccaccagtgttaaaatgccgcttcgccagctgcacaataataaccccaaacccaaatgaaataatgggtaatatcttttcaggaagttgtgcccactggttcgttgcgatatctaagccgatgaacacgatattaccggtctgtgcactcgcaaagacgccaccacgtaaaatcacacaatacgcatctaagaagccaccaagaaacgttaaaaacatcgccgtgcttagccgatcatgaaaccctatttctttttgcaacccaatccctccaaatcaatactcttattatacgcaaattaaaattgaaatcaaaaaacgaattgcactatttcacagtcgaaataaggtacaatccgctttacactataaattaattgaattgacatcttgaccatggaccacttttctaaagtcgaccagtcctaagtccaaaccgcgcagcaatacttcagccgtcccgacgttggttgccaacggtacttcataaacgtcagataatcgaattaatgcattcacatccggttcgtgaggttgagcagtcaatggatctctcaaaaagattaccaggtccatcttattttctgaaatcaacgcgccaatttgctgatcgccccctagaggacctgacttaaaccgtgtaatcggcaagccagttgcttcaataattttttgaccagtcgttccagtcgcaaataattcgtgttgcgccaaaataggtttataagccgtcgccagtttcacaatcgttggtttctgacgatcatgtgcaatcaatgcaattttcatctgaatccctcctaatgtctgcggtgtttaaccaccgtaaaaaagtgtaacacacttgccaatagaatgaagaagattaaaacgaacgacacataattaagccaaaactggccaattggcaacactaagttcactaattgttgcagtaccatcgtaatcaaggttgcacaggcgaccatgccaaatagttgtatataccgtttcactgtatcatccgtcctctttgctttagattgaatgcttgcgccgacttggcgacattccgcttgtttctgcgctgaaagtgtctttaaaccatacgtttttgtctggacaacttcccggatttttaaaagtccagctgcccccaagactttatcaaaagttctaaaagtcccgtcagtcacaccagtaaccaattcctcagctggactggcataacaactactaatcgtaatgtaacttttgcctttgaagcgatctggtaacgcatctcccgcccgattaaatcggactaaccgttgccgcacgcaatccaaaaagttcttcatcacaccagacattgcgccccaataagttggcgcagccagtatccaaacatcggctgccaataacttagcttccagttcatccaataccggattggctttgccagtatctggtaatatttgataatcatttaaaaagatcacttcaacgtcatcttccggttttacacctgctaaaacggcatctaaaagttgcccattgaccccatctcgttgatgactgcctaacactcctaaaatcttcatctgatcaagcctcactctttatactactttcagtttacacttccaatcactaacttaccataaaaaaacgcccagaccaatggcctagacgttgtcattattttagtttagtaccaaccattacttaaccagaagctcttagcggcatcccatgaaccataacgacttgttacatattgatctgcaacgcggtcttggttagctgctgaataatcaccatttaagtatgaagctgataattgataacggccgattaattgaccgttacgtgctgaatatgaaccgcctgattctttttgtgcaatccattccttagatgaactcgttgtagttgttgtttgtgcagctacaggtgcttgttgtactggtgcagcttgaactgcaggttgtgcttgaactacaggggctggtgtttgaacaggtgcagctacttgttgagttacaacaggggctggtgttgttgccacttgatcagcatcaattgttaattgttcaccaacaaagatcatattaatatcagcaatattattagttgttgcgatttggttaacaagctctgtactaccattgaatttttgcgcaatggttgaaagcgtatcaccatttgcaacggtataagttgttgcggcactggcttgtgattggttaatgaaaagtaacccggttgttgcaacggttgttaaagcggcactgtaaagtaaagtttttaaagatttcatattttgaatggactccttattgtttaaattgatttttctatctgtttaacgtgggactaatataccatcttaaatccgttagtaaatatcaaaaccataacaattgatgacaaatccgtaacaaaatgacggcaatttcacctaactttgtaatgaagcccacaatttaattgacatgtaatcggcctaaaagctaataacaccaaggattacagtcaataaaaatgctaaatatgctattttgaattaattaaccttctttcaaaaataatcgccccatttaacgtaataataagacgaggtgatcaaaatgaaagttttaaaattaaatgatttagatttaaacgtcgcattggatgatcgaatgattcaaatttccggtgctcaggacaaaacattaattttcaaaagtaagctattagcacactattggttcttcaatttacgggctttagctaagattgcggatcgctatgcgatccaaatcatgtttgagacagagaactacaaataatctgccctatcgatatgaagccacaaaaaaagagctgattactcagctctttctatcttaattgggtatatagggctcgaacctataaattccggattcagagtccggtgccttaccaatttggcgaatacccaatatcatcaacgaatactatgatactgcacactccagacgttgtcaattatgatttttaacaaatctttaaaagaggactatactattcttggaggtggttccaatgatgaaaaaagcagaaatcgaaaaattatttgacgggaaagttgccgtatatgatcaagaccacgttgtgattgattggatagattcacgcaggacgcttgaagtcacaattgataacgatattctaaatctactgataaaccatcaggactatattcggaatatcttgaaacatttaaagagacaaacaaatcgcaccatgaccaaggaaattgttaacattaatcgttgtaactataaaatcttcatttagcctctctagagtcaattaaccattgacattacaggctttattcgctaagatattagttgttccgaacattgcccgttggtcaaatcggttaagacgtcgccctctcaaggcggagttacgggttcgatccccgtacgggtgatatttaaaacagcctagaacccagaaaagccgttaaactaaggtttagcggcttttttgtttatttaaaacgtgtaaaaaagctagcctcctgacgctttagttagggggctagtttttttattgcgtagatttcttctattaaaatggcttcatttgccacaattatttggctaccaaaccagccactgattaaaccttccaccttactgggtacaataccttctattgaacgttctgctttgtcgatttgaaccggataacatttaacaattgcgtcattgatggtattagcaatcatctcagcagtcatcgcctcaatgtgtttttcattgcgcttacgatcttgtacgcggttattcttatctaacactgccgtatgatcgcttaaatagaacccttgccatttcatcatgccacgatcataataatcatacttcaaaaattgattaaccaaattgggatcatattcatcattattcataggcgttccctccagcatgcccaccgactaagccagcacgctcaattgcagtcgcaccttttactttgctagacaatttgaccaccgatgtaaaaccgtagcgcttgcgaatttcatcgaccgtgctatctaatttctgctttttcaaattaataaactgtgtgtcgaacatatctaattgttccgcactatcgtcaaccaaattgctgcacgcaatactaatatgccgaatcgattcgtgttgccattcttcacgaaaaagttggatggcatgttttgtgagttgctgattagcattagtcgcatcaatcttcattgaacgcccaaaaccaccacgcgatgcaccctcttttgcagcaaatgaaaagccaatccccagactgataaccgttgtcgccttgtgatgcgccctaagacgtgcagccacttgctctgcaatttcccgaatcacaacttcaatctcagcttggataaaataatcacgtggtaatacctgactattcccataagacttctctttggccttatatttatgccgcacaacggcccgatcaatcccccaactaaacgcaaacaactgcgcgcccatgacacccatttcttgttttaaccgatagggatttgtatgcgcaatatcgtacatcgaatgaatgtgtttctgattcagtttctctgccgtacgatgcccaattgaccagacatcatctaactgggtcactggccacagtttatctgggacatcttcataatgccattctgcaatcaaactgtgattccgtttggcctcaagatccaatgcgagcttggcaagtagcggattatcgccaattcccaccgttaaataaatgcccgtttctttttttacagccagctgaattttacgtgcgacttcgtacggcgtcgctccaaagagttgccaactatccgtgacatcaagtaacgattcatcaatggaatacggttgaatatcttcttctgccgtaaattgctgaaaaatacggttaatcttctggttctcttggatatacaaattcatcttgggtggctcaatgattaaccgtttatcatgaattggaacatcccgggcacgtgttacgttactgataccaaataatttcttagccatgggactggctgccaatactaaaccactgcccgtgtttttctccgtggacatcaccaccaaaatagcctttaacggattcagtttcaaccgaacggcctctactgatgcgtaaaaagatttcgaatcaatcattaaaatcacgcggcgtggttcattctgatagtcatacacgactcttcaccccaacttgaatctgacgcacttgttcatctaattcgcgttgccaccgattaatctcaatcaaggtgacggctgatagatgacgataaataaattgcggaaacttatcgcggttgtagtaataattcattgagtcaatcaaatcatcactatgattcaccgctaatcgccgcaattctaaaactccaaagccatttaaatataaactcaatcctgtttgatctagcgtaatcacttctttattcgtatgcatcaggcacacctctttaattcatcttatgtcctcttaattatacgaacatacattcgatttagtcaagtgtgatttctcagagaacaaaaaacgctcaatcaaattaaatttgattgagcgttaaaggaaccttaaattttaataccaaccgttacttaaccagaaactcttagcggcatcccatgaaccgtaacgacttgttacgtattgatctgcgacgcggtcttgattggctgctgaatagtcaccatttaaatatgatgcggttaattgataacggccaatcatttgaccgttacgcgctgagtatgaaccaccagattctttttgcgcaatccattctttcgctgaactagttgtcggtgcaacagcaactgtttgttgaactggtgcagcttgcactgtaggttgtgcttgaacaactggtgctggtgtttgaacagcggctggttgtgcaacaactactggcgttgtcgtttgaacaggggttgctgtttggtcagtgtcgattgttaattgttccccgacaaaaatcatgttgatatcttgaatgttgtttgttgtggcaatttgattgactaaatctgtgttaccggcaaatttttgggcgattgttgataacgtatccccagttgcaacggtataagtagtagcggcacttgcttttgattgaccaacgaaaagtaatcctgctgttgcagccgttgtcaatgtagcgctaagcaataatgtcttaaaagatttcatgtaatagatgtgctccttgttgttttgatttattaacgtgggactaatataccatcttatattcgcttgtacatgtcaaaaccataacaattgatgacaaacaggtaacaaaatgacggcaattcccgcgctaattgtaatgcacaccgcttacttgactgctattacacaaataacgcctaggacaatcttctgtcctaggcgttataaactaatttattgatgttattcacgacgttttaaatgatacttagagaccgatttttggcggccaagaactagcggaatacgttccacgaacacatcactatagtccaatccaaaccatgaagccggtgtatcagtgaatttttctaaccataaacgcatttgaacaatccctttatccattgctcgaatttgagttgctggtgataaatcttcttgcatgatcacaaacgagaaatcaccaacgttccgatttggaattgttgtgtagcgttgtggttgtgctggtaattctccccgatgaatcatttcttgaatgatttgacgaataaagatgttcactttttgttccatcttaaagcctagatacaactgaacgttgacaatgtagtccgtcccaagcgtatctgcggtatattctgccgtatacggttcatcagtaacattgaccgcaacaaaccagtaaacttgcgcccgttttggtcgtttatccaaaatagaataaagaatattcttcttaaccatattcttttcatatggtttattctgtggttttgaaagataaaccaaattagtcgtatacatagctaacgctgtatcgtctcgcaaatcatgtagttgttgtttataagctagtaatgaaaccgtacttgccttgaaagtattactttccttaatcgtattactacgataccaaacaaacatgatcgatagaataaacgccgcaattaagactgtcacgtaaccaccatgcatgaatttagcggcacttgagatgaagaaaataacttcaattgtcccgaagaagatgagtaccaaataagccaatacccatttcttctcgcggcgtcccaagtaatggaatagcaagatagttgtcattaacattgtaatcgtaatcgccaaaccgtaggcagcttccatgtgcgctgagttcttaaaatagaaaacaaccattaaacaaaccgcccatagaatccagttaacgattgaaatatagagttgcccttttaacttagccggataatcgaccttaattcgtggtaagaggcgcaacttgattgcttctgatactaaggtatatgaccctgaaattaaggcttgtgatgcaataatcgccgcaattgtagccagtaaaatcgctgggacctttaattgggctggcatcacttcaaagaatggattgaaatcagaaatatgttgatatgccgcaatatctttatgttgtaataaccaaacaccttgtccaaagtaattcaacactaaacaaagcgcaatgtatggccaactaccatagatattcaaccgcccgacgtgccccatatccgaataaagtgcttcagcccccgtagttgccaagaaaacactgcctaaaattagaatccccaccttattctcagggctaaacagtagttcaatcgcataatacggattgagtgccttgagcatcgttagatcccccattaagttaaccaaaccaatgccaccaataaaggtaaaccaaattaacataatgggaccaaaagatttaccgattagatcagtcccaaatttctgaatgaaaaataagaccgataagatcgagaccgtcaataaaatcacctgatcttgattattaattaaaacgttcccattaattggcaaaccctttaacccttcaatcgccgtcgtgactgtcacagcaggtgttaacatcccatccgctaataacgtcgccccaccaataatcgcggggatcacgagccacttagcttgcttacgaatcaaagtgtacagtgcaaaaatcccaccttcaccattattatccgcccgcaatgcaatcatgacgtacttgatggtcgtcatcaacattaacgtccaaaagacaagcgaaatactgccgatgataaaatcgcggctgatgtttaccaaaccgccattcccctcaacaactgatttcataacatataatggcgacgttccaatatcaccgtaaacgacgcccatcgtaatcaaaatccctgcaactgataatttatgtccagttgtttgtttagttgtctttaatttcatgatttgttacttccttatactccaatatagcattatcgtagcttgttccagattgaaagtccagtcttatcatcaataattatcaatccactgtattccatgctataatagggacactgaaacaagcgagggatacaaatgaaagataaacgtcaatttgaaattgctaagaagcaatacaagaaactagcgaaccgaccactatcaaaggaacgtaagaaagctgttagtaccgcttcaacttacatgttcacaatcttagttgtggcctttattctattggttatttacttgttcgttcactaaaactgcgtaagcagtttttttttacgtattttttttgcagaacatatattgaatattatttttcgtacgtatataattgaataaatagttttttaagcttaaattactacaaaaaacacgaacattatcgagaaaggcggctctcatgccctcaaaaaaacaagtttatctcgctggcccattttttagtcccgaacaaaatgatcggttagatcaagtggctgatttactcattaaaaacccgacgattgatgctgattcacttttcaaaccaggccaacacccttatcctgatgcagaattcggtactttcgaatggcaagtcgctacttttaatgttgatacgcgtcaaattgaccaagcagacgtcgtagtcgctgttatggattttaaatctgaagaaggcgaattcgaacctgattccggtaccatgtgggaatgtggttatgcttttgcccacaataaaccagtgattctcgctcgtttccgtgataatttaccaattaacctgatgttggctggttctgcaacggccatcttcaatggtgaagcggatattgaaaacttagcgacttatgatttctttgaattacacaataaatatgttcaaacagatatcttttaactcaaaaaagaaccgactgatgcgtcggttctttttctttggcctaaaagccgttattctcgctcaattcacggtaccatcgaccactcttcttcatcgtgcgctttacctcatggtccaaatcaacacagtagaaaccataacgattccgataaccatctaaccaagaccaacaatcattgaaggtccaagtatgatatccaaaacaactgctgccggcttcaattgcacgatgtagttgcgtcagatgttcttgcataaattcaatccgataatcatcttgaatttgcccatcttcacccataaagcgttcttcatcggtaacacccattccgttttcagaaacgtaccacggaatgttgtgataatcatttttcatcatcattgccacatcgtacaatgcttctggataaatctcccatccacgatatggattaatcttccgttctggccaaatataattagcatataagtcttccggtgtttgtgctgggaacttcggattctctggtgcttgaacccgcattggttgatagtagttcacgccgataaaatcgacacaatgatcggcaatcaattgccggtcgccttttttcgtcattggtaataactcatgttttgttaagaggttaattaattcttctggaataacgcccaaaacagttgggtctagaaaactcttagcgagtagtaagtcagcattttgtttagccattaaatcctctggtgcatcactcttagcgtaagctggcgtgatatttaaaataatgccgatctgactatccggcttcacttttctaaattcagcaacagctgctgtatgcgccatcaaggtatggtagccaacctgaacagccttcttgaagtcaacaatgtctggataatgatagcccgttaagtaaccacattcgatatgcacgataggctcattaaaagtcgtccagcgatcaaccaaggcaccaaacaattcaaacgcagtttttgcgtagaatgcaaaggcatcaactgattcgcgtgtctcccaaccgcccttttccattagccaccaaggcatatcgaaatggaacagattaatgatcggtgtaatgtctgcatcacgtaagcgcttaaaataatcccgataaaaatcaaccgctacttgattaacatgtttgccatcgggcattaatcgcgtccaagcaatcgatgtccgaaatgagttcaaaccaatcttttgcatattttcaacgtcttcacgatacaaccgataagtatcactagccgtgtcaggcccttgatcgctattaaacttatcaggttgcatctcaaaccatttgtcccaggttgatggggacttaccataacttagggagtatccttctgattgaggtgcggatgttgctgctccccacataaaatgctctggaaatttaatcataaacgctactctccttaaatgtaatcgccaacattttatattgtaccatttctctaaagtggtcgcacacctttctcagtcgattatttaatatgcgtacctccgaaatattatacacgttaaataaattgtagactgagattaataatatgcattattataaaataatttatttttttagggttttacacgtaaaagggttgtaaacttccgttattttatgatatattcaataacagaaatgattaatactcccccaagtaagatcatttcaatattcagaagatactcggtataggcctttcccaattaaggtttatgccgggtattttttgctttgaaagcaaaaaaaatagtcctgacggactatttttagaagcggtttgttatgcaaaaatcatttggaaaatacctgcaccacagatggcaccgataattggtgcaacaactggcacccaagcgtaactccattgtgagtcgcctttgttcttaagcggtgtgaacatatgcaccaaacgtgggcctaaatcacgagcaggatttaaagctggtcctgttgggccacctaatgaagcaactaatgtcatcaccaataaaccaacaacaatgtggccggcagcgccaaacttacctgcaccaattgctaaagcaccgaaaactaagatcaatgtgcctaaaaattcatttacaaaaccattcatccggctatgagcagcatcgattgttacgaatgagcccaagatgccttcttggtttgttgtgcgatcataatatggtttgtaagcagcaaccaataataattgaccaaccattgcacccaagaattgaacaatgatgtatggtaaaacattttcccaagggaataagcccatcactgcaaaacttaatgtaacagccggattaagatggttaccggaaatgctcccaaacataacggcaggaatcataaccccacaaccatatccaaaagcgattaaaaaccaatcactactaaaaccttttgttccttttaattcaacgttggctactgccccgttaccaaaaataatcataattgcagttccaataaattcggcagccaaacgggttgtcaaagaagcgtccactactattcctcctataaatgattcatatttttacgtatcatattataatacgggaaaatgcaaggaaaaacaattgacttttctgtttaaatccctttcatgagaagattcatatttttacagacctttctgtaaatttgacttgctaatatctcataaaatgggataatattcattgactaaccgtattaaccctgattatccgattactgttttggaggttactatataaacttaatactcgccatcgttctttatgcaggccttgctgtctttgcatttggcattatcctgctcctatttttcttaatttttaaaaaacggcttaaagcccctctaattatttgcttgattggtttgattatcgcggcatctcctgttggctataacttctacatggctcagaaagaacaccgcgaagaactagcgaagattgaaaagaaagataaaaaattcgataaagctgaacgccaattcatcaaacatattaaaaaatcgactgttgccactgaattcatcgctcaaaagtataataaagtttggggcgagttaacagaaaacggaacagttaacgtcgcaaatgttgattataacgatcatgatagtgctgttgctgctgaaggtcggcgtttactagcacaaggaaaactcgatgacgctgatgattactatgtcagtgctcaaggtgactaccaaaaaatgaaagactacgcgactgataacaatcgccaagaactcgtttatgccaaagatgtcttatccaagactgggtcgttcgtctctgttgcaacccgtccaaacggaactttccaagaatacactgatgatgtttacaaggctaatcaacgacatgtccgcgcaattcagaagttgaaattttcttacagtagtattaaatagtgaatatggtgattttgaaaaaaagatgaaatgggttacaatgaagtagaagactggggagtcttttattttttgattcatagttaaccctattatcgattgggagtgtgagaaatgcgtcacgtcaaattattattcatgattttaggtctaacttttattttaaccgcttgtgggaatccggttaaagcaaagctccacgaaacaaacagtggcttcaatgcgcaaatcactggtaagactaaacataaaaaggtttattggcaaatcggtgataccattcatacgactaaaacaaccgatgatgctttcgcattcgaagtcccttacaaagctaagcagtaccggattacacttgctgataatgaagaaatgcgtaatccaacttatgttgaaggccctgtcgcaaaagaaattgtgcaatggccgaactttattcagatttataatccgattgcccaacaaaaaggactgggcgttttcgaagcgaatccacttgaaggcattcgcactgatcaagttgacagcaacaacgtgattgccatgaacgtcagtgatagcaaagtactggggatctcaattaaagctctcaacgcaggtaagaatctaacgtttaaaaactacgtcctcgccttttcaacaagtatcggaaccaaaccaacccagattactgaattggtcgaccgctcacttaagaaacctgggtcattaatgcaactgacggatcgcgaagttcgctataccgttatgacgaccaataacaacaagcaacaagtcacacaactttcaattaatcatttataaaaagaaagccgccgaatctacgattcgacggctctttttttatatagtggttaaaaaatttcgggagaaattattcacattcttattatagggcgcagttcaatcaaagtaaacgatacggtcggcacaaattagtggtgccaaattgttatagtcactcaaccagctatcccccatcgaatttaaagtgcttatttacggcatttcttcgtttaaaatgctatattgaaggtaaataaaggaggtcttttttatgtttaattatcagcatattcttatcggtttagatggttctgagttatcagaacgcgctttcagtgaggcgattgaaattgctaaacgcaataatgccgaattagttgtggctcaaattattccagataccctttacacaaatgcacgcatgacttaccctactgaaacaacgacatctgaaaaacatttcgttcaatcgtatcttgatcaaaaggtgcaattcgctaaagaacacggtgtccctaacgtacgagccatccttaaagtgggttcgccacgtcgtgaattagcctttaccatcccagaagaagctcatattgatttaacagttctcggtgtcagtggtaagggcgcctttgagcggctcttaatcggttctgttgcacaattcatcagtgttcattctaacaccaacgtcttattaattaagccttaagccggtttaaagattggttaagtttaatgctttgtttttgacgtgtcccatttctaatatataataaaggtagtttaggagtggttcgaaatgccgtttgatatcactaaattgtctgatcaaaatattaagcgctggttcttacaacatcgccaagcaatcgttgcaacccttttgcacccaaacacttggtgggcaagttttaatcgccaattaatgcgctttttccaataatcactaaaagtgacgactgaatttgccgtggtcactttttttaatgacgtttttttaaaggagttctgaccgatgaccgagcaaacttatacttttacagcctcaatccaagccgcgacgattggtaaaggcggtgcatatgtctaatttcctggcgatatccgcgcaatcttcgggaagggtcgtgtaaaagtccacgcccttttcgaccaacaaattccctatgatggcagtattgtcaatatgggacttaaaaagccagatggcaacatttgttacattcttgggggccgcaaagacatccgtgcacaactcaaaaaagaaattggcgattccatcacagttgaaatccgtgagcggctatagctattacgcccctttaaatgctatactattttaaatatttatttcgtcgactaaatttagaatgaggattatcaaatgccaaaacacctttacaagcgcgtggcagtcgttttaatactgattaccaccctttttttatggcttttcacaggaccgaccagaagtgaggccgggatttggttcttccataaaaccacaccccaaaaaattgttaagaaaaaaacacccaaaaaaacgatgctcgacatcacacccatttcacaatttcctgaattaccaaccggttgtgaaattacggctgttgccatgctgttagattaccgtagcgttgacatgagcaaaacagaagtggccgatagtatcccttatgtcaatgatggcgatatggaggtcggcttttgggggaatccatacgatgatactggctacactatgtatcctcccgcttggacaggattcttctatcaatatctcggcagtttcaccgatttatcggacgaaccgattagcacgctcaaagctactttaaaacaaaagaaaccaattgtcgcttggattaactaccataaacaaccagcgcattccgtcttattaattggctatgatcaaaattcatttacctttaacgatccatataccggcaaacgaaaaaaaatctcatttgataaattctggaaaattgctgcaccacagggacaccgtgcaatgacttattaatcattaacttgggggatttaacatgcataaacgaaccattgcagtcactttcattactttaagtagtctttcattagctagttgtcggtcaattaaacctgatcaacaagccgcaacccactccgaaagtttagcacgctatcgcgcctcatcagaagcaaaagaaagcaatcagcgtcgatcaatcgctagctcgaaagaagcttctattaaacaacaatcagaaagtatcgttgcagcttcagaatctattgaacaagcaaaacaacaatctaatcagtcaacaagtgccaaaaaagcgctcactgccgaccaacaaacttctgttaatcaagcttttctagcgtgggcggctgaacgcgccacaatcggaaacatggccgtcagtgattggtattttgaccacggtgctgccggatttggcgattggtttgccaattcacctgatggccgcattttagttcaacctgggacagcaagcccagggtttaatgcctaccctgttcatgcaattggtggctgtgtcttttataccgctttggatggaacagtcggtaaagacaatttagatcgtggatcattcgcggataattacagccttaacatggcaatggacaaaccggttagcaaatacctacttggtgataacggcgtcgtgtatgaacttaaattaggtaatggtcacctcacatcaactaatgatggtttcagcgaactaaaagatgacggcaaacaagcttactcagaaccacttgtctttgccgtttctgaagacaccgctgcccaagctgaactaaaatctttacttgctaactattagagtttaaaggagcacgactatgaacaatgccgaactacaggcctatcttgaagaacattcccgcgtcatcgatacatttcgagccaaaggtttagactaccaaaatgaaaagaaccaaaaacgccaacctgccaaacgttggaacgagaataaggtcgatcgggccgttgataaaatggtcgccgaatttatcgctagtattcaagtgaaaatggcattcaacattcgtggtgaacacgccaaagaatatcaaacttggttaacgttcattgaacaaaatgaagttgtcgaaggcttggaagaatcggttaatgaaatggcgtttgaatattagaaaaagtagtttcttttaacgaataattttccgaaaagtaattgcactggataatattaagggcgttgaattgttaattatccttgtgattttcttatcaatattatatgatttacttacgaaaggtggttttaaattatggttaagttattctttaacgagggctcaaaaattacgctccaacaaaatgacacattatctgcctttggttctacaaatggttcacgccataagttgaccatcagagactgtgctgctgcagatatcgtcgcaaaaatctcgcactttgttaaggacacgccggcttttatcctcgaaaatagtcctagcgaaacttatcacagctcaaatctcattatgattactacacgttaattaaaagactgccgttgggtggtcttttttattttataactcaaaaacgccgctctcttgagcgacgtttttctttcagattaactttattgatttaaataattatataagctgcgcatggtcgcatccgccaacgttaatggctgcccatccaacgtcacctgcttaattgcgacgtaatcttcgaaatcgggtacttccagttgttgatttgcgacaaattcagccgctttttgataaaccttttcagcgttcgtttgaccgttgagatattgaatgactaacattgccatcatctccatttttacttttaatattattgatgaattggtcatctttgataaggtcattatacttggcttactaaaaataagcaatttatatattttattctttatccgtattaaacaaaaagcatttaatccatttattttagaacaatgcaccaaatactgcaccatttcataaaatcaatagactaaatgctttaataaaagtcgaattttatctttataaacgttgaattataggcgttcgtttaattctttgcctaattcttcaaagccgggtttgcctaataaagcaaacatgttcttcttgtaagcttcaacacctggttggttgaatgggttgataccattcaagtaacctgagattgagacagccatttcgaagaagtagatcatgtagcctaatgtgtaggctgtttgatctgggatgttaactgacataacagggacgccgccatcagtatgtgctaagacaacaccttggtaagctttcttgttaacgaagtccattgtgtggccttctaagtagcctaaaccgtccaagttcttttcgtcagttggaatatcaatgtcgctgttagggttcacaacgttgacaactgtttccatcaagttacgacgaccttcttggatgtattgacctaatgaatgcaagtcagttgagaagttagcacttgaaggataaatccctttttggtctttaccttcagattcgcccatcaattgcttccaccattctgagaaatattgcaatgttggttcgtagttttctaataattcggttgtgtaacctttgcgataaagaatgttacgtaaagcagcatatttgtatgcatcgtttttcataacgtctgtatctgtgtattcagtgcgggcatcagctgcacctttcatcaattggtcgatatccccaccagcaacggcgattggtaataaaccaacggctgttaatactgagaaacggccaccgatgtcatcaggcacaacgaattcttcgtagccttctgcatctgattctgtcttcaaagcgcctttagcacggtcagttgttgcgtagatccggctcttagcttcttctttaccatatttcttgatcaacttgtctttcaaaacacggaaagcaattgaaggttcagttgttgttcctgattttgagataacgttgattgagaaatcgcgatcgccaatcaagttaactaagtcgtttaagtaacttgaactgattgagttcccggcgaataatacttgtgggaagtcacgttgttctgctggtaacatgttgtagaacgtgttattcaagaaatcaattgcagctttggcgccgaggtatgagccaccgataccaattgcgatgaaaatttctgaatcgctcttaattttagcagcagctttcttaatgcgggcgaattcgtccttatcgtagttcactggtaaatctaagaaaccacggaagtcgttgcctgcaccagtgccttcacgtaattgtgagtctgcagcattaaccattgcttgcatttctgcaagttcgtttgattggacaaatttgtccaaacgggatgcatcaaatgaaatatgtgccatatttgtcttattcctcctgtttttaaacacaagtatacgttaataactttagcttttttagcgctaaaaagcaagccagatcgaccgctttttcagactagaccacctttattttcaaaagaaaattactcaaagtccttgacttgtttcacccatcccgctatacttcaaatcatcaaataaaacggaggttactgaaaatgacaaacactcacttagtacaattgaatattcgttggcaaagccgctaagtgagattgtatgccgttatggatacagtcttttgattgtatccatgcggccattcatcagtaatcgattgaattttaagcctacatggattttaactcgaggaaatccatgtaggctttttctgtcccctacatgactgtcatgtgggggacttttttgtttgataataatgagtgcgttcaaaccgggtatatttcgaacactagcctagtggtgcgaatgaacgacgcagtcggtcgtttgtgcgacgtagctaggcacaggaatacggtttgaaaagcacgttaaaaaatagaagtgcgtttgaaacggtttgactctgagcattaacctaatttaccaaattggtgatgtaatcaccagtttagtaaatgtagttaagcacaagagtcagtttcaaaaagcacgttaaaggagctttcgccatgtctaaactcaaacgttttttacccctcattctaatttttgggagtttgctcaccctacttggtatcaaaaaaatcaaagaagccaaccaacctaaattgccaattgtcgggatttcacaacccttatctcatcccgcacttgatgaaattcatcgcgggattgtcgctggtctggcaagcgaaggctatcataacaaccgtaatatcaaaattgattttcaaaatgcgcagaacgatcaaagtaatttacgtctgatgagcaatcaattcgtcactgaaaaagccaaagtaacggtcggcattgccacccctgccgcccaaagcttagccaatgctactaagcaattaccgattatcttaggcgccgtgactgatccggcgagtgccaatctcgttaagaacaacgcccatcctggtgccaatatcaccggcgtatccgatcaagccccgattcgaaagcaattggcattaatgcaaaccatcatgccgcaactgaaaaccgtcggcattctctattcaagcagtgataactctgccaccagtcaaatgcacttattcaaacaacttgctgaacaaaaagggctgaccgttgttgaggccagtcttagttcagtcaacgatctggaacaagtcagccagaatctagtcccaaaagtcgatgcaatttacgttcccaccgataatacgattgctagtgcaatgggcaccctcgtccatgtgaccgacaaaaccaaaacgccagtctttccatccgctgaaacgatggttaaagatggcgggctcgcaaccgtcggcctaagccaatacgacttaggcgttgaaaccggtaagatgaccgccgccgttttaagtggtcgttcaaaacccgcaaccactccaattcggtatttacgcaaaggacatttagtcttaaacctcaaaaaagcaaaagccctccacatcacaattccgcagagtttaatgcaaatcgctaatcaaaaaggagctgttctcaaatgaatcttattatctcaaccattgaccaaggattattatggagcctactaagcctaggcgttttcatcacctttcgaatcttaaaattccctgacatgaccgttgaaggcagtttcccgttaggtgcagccctcagcgctttaatgttgcaacaacataacattgccttttccttattagtcgcattcatcggtggctgtttagccggactcgtgacggcaattttatacaactacttccatgtccagagtttgttagccgggattttaacgctaaccggtttgtattccgtcaacttgcggattttaggccaagccaacatggcaattggtgatcaacacaacctatatcaactgccgctattccatcaattaacgctcgatcaacggctcttagtcattaacctagtcatcatgctgatcgccctattattactggctggcttactctacaccgaattcggtcaatccctgattgcagctggtgataatcccacgatggccctctcacaagggattgccgtaaagcggacgaaaatgattgggatcgtgctgtcaaacggcttgatcgcccttgcaggtgggctcgttgcacaatatagcggctttgctgatgtcaacatgggcatcggtgtgatggtcattgggttatccgcgatcatcattggtgaacggctccttgtcggcaagcatttcatcgccaaactaattagcattatcctaggaagcgtcgtctaccgcctcatcttactccttgtcttacaactcggctttaacgccaatgatttcaaactcttctcggccgtcattttggccatcttcatcatcgcaccacaacaaaagaaaggactgactaccaaatgaccccgcgtatgactttaaaccacctcaattttgaagttactgataataatgaacccaaacaactcttaaatgatttaaatctcacgattaatcctggtgaatttgtcgtcctccttggcgcaaacggtgcgggtaaatcgactttttttaataccattgcgggtgatttaacccccacaagtgggcaactactattcaacgaccacgacattacgaagcaatccgcccaacaacgcacacggctcattagtcgtgtctaccaagatcctaagttgggcaccgcagctgatatgaccgttgccgaaaatattttgttggcgatgcgccgtggccaacgccgccgcttatttccccggcgtctcaagcaacaactcccacaaatcaaagcgctcgccaagacactcccgaatcacttggatcaacaactcaatcgcccggttagtaacttgtcgggtggccaacgacaaacgttaaacttcttgatggcgacgattcaaaaacctgaattgctgttattagatgaacacacatctgctttagatgcagtttccagccaagcattgatgacttttaccaatcaaacaattcgcgataaccaactcacctgcctaatgattacgcatgatttagaggatgcgttgcaatatggcaatcgactcttggtgttaaaagccggtaaactgattgccgacttgaacgcgactgaaaagcaagcattaactgtcgatactttactagactatttaaactaatcaaaccgcgctaaccattttcggatagcgcggtttttgctgcttaaatccattcaatcttatcaagcaccaatttatcagcggttaattaattaaggatatgattaacctacgtttaacacttgtaatcgttttctaagtatgctaaattattcccataaggttgtgcgcaacctaattattgatttaagggagatctgtataatgacagttactactcaaaaaactattccagctagtgttgctatgcttagagttatcgaatcttggggcgttgatcatatctttggttaccctggtggctcatttaactcaacaatgaatgctcttaatattgaaaaggatcgtttaaaatatattcaaattcgtcacgaacaagttggggcccttgccgcagctgctgacgctaaattaactggtaaaatcggggttgcttttggttcagctggccctggtgcaactaaccttttaactggtttatatgatgcaaaagaagatcatgcaccagttttagccttgattggtcaagtaccaagcaagaacatgaactacaactacttccaagaattcgctgaaaacccaatgttctctgacgttgctgtttataaccgcctcgttatgacacctgaaagcttgccatacgttgttgataaagcaatccgtgaagcttacaaacacaatggcgtcgcagtggttgttattccaaatgacttcggctacgttgaaattccagatacaccatatagctcaagctcaccttcagatcgtaaaaaagtggctggtccagtcgcaacagacgaagaagttgatcaattcttagcaatggttaaagacgctaaacgccctgtaattcacgttggtcgtgggattaaagacggcggcgataagctcgttgaattatcaaagaaacttcaaattccaatcgtcatgactgggcttgctaaagggttagtgcctgatagttatgaaggtaacttaggcatggctaaccgggctgcttctaaagcggctgatgaaatcatggccgttagtgatcttgtgattgccatcggtgctgacttcccatttgccaacttaatttatcggacacatgacttcaagtttatccaaatcgataacgatgaagcacaatttggccgtcaccatttcttagacttcgggatctggtcagatgcaactgcttttgttgaaaaagtaatcgccagaagtgaaacggttgccccaacaccattcttcaaagctgctgttgctgatatggcaaactggcaagcctatcttgatgttttaacgaaccgcgactctgatccgcttgaattcgaaccaatctacaaagaaatcaaccggattgctgaagacgatgctgtcttttcaatcgatgttggtgataatatcatcaacagtttccgtcacttgaacttaacgcctaagaacaaatgggtgatttctgccctctttgcttcaatgggttcaggcgttcctggtgccttagctggtcaattgagctacccagatcgccaagtcttcaacatctcgggtgatggtgccttttcaatggtcatgcaagacttgatcactgaaaagaaataccaattaccaatcattaatatcatcacatcaaatgccgcattaaacttcatcaagagtgaacaagatgatattccaatggattactcaggaatcttcattgaagatcaagattttgccatgattgcgcaagcaatgggcattgaatcaatcaccgttcgttcttctaaagaattacccgctgcctttgacaaagcccttgaagtcacaaaagctggccgaccattcttaattgatgctaagatcactgacaaacggagtattccagttgaagaattagaactaaccattaaagatggtaagttaacagaaacaattagcgcaagctatgatgcttctcgtcctgctggcaaagaatacagcgtggctgatttcttcgcagaatacgatggtcaatcactgaagacattaccagaattatttgaagaaaacggtgttgaactataaaacaacccggccatcataaaaatagcgtctcaacacattgcggtgtgttgggacgctatttttattgatttaatttttggtaatggcttctttaggatggaaccaaacgacgttcttgtcgaagaatgagactaagtcgtttgataagtacaagatataggtgaagaataagacccaatttgagccaccctgcattgctgtaatgccccacaacgtgattgatacgatactttggatgaaccagaagtaatagctttctttaaaccgtaatgtggtcaacagtgcgccagtaaacccaactgaagcggcgatactatcgatcaatggtcgtggactgtccgtcatattgctttcccagagatataataacccaactgatacaacaaagaacaatagcgtcaacgcccaattacgaagtcctttaccacgagtagcaagcccccggacttttttatcaacgttttgcgcccaatctggcattaataagactgggatgtctaacataataatgtagacggtttgtaataccatatcgttatagtttttagcattataagccacaataatgtagattaatgcagagatgacaccaaagacaccgtttaaaggtttcgtattcgtaatactaatagtacaggtgaagcctaacatccccgcgagcatcgttaaaaacgacacgccagtcattggaccaccggaaatagtagcagctaaaataaagcctaacccaaacatcaacaaaccataactggatgttgtccaccctttcatctgttgaatgtaccacttaggattaaatacactggtgattgcacgattgtcctgcattgaactgaacccctctttatatgaatttaattatcactccagattgtcaacaccattttccatatattgatgtgccatctgacgaaacaacactatatatggtacacgctaagcattctaatttaaactcttgtatttaattcaatttgtggtagctaattttaaagcctttttgaaagtgccgttaacttacgattgcaagcgctgaactagaccattcgaaaatattttttatttttagcgttcgttgtcaagactcaattcaatctttgaccaatggcttaatagtctctttgatcaattgaccggagaatgacttcattaatgcccacattatctggtgtatcgatggcgttcattacggcattagcgacatcggttgctgttaatccagtttcagtttcactcttgagaacagctgctcgtaattgcggatcactaatccggctggctaattcggtttgcgcatgtcctggagagattaacgttgatttaatgcccattccaacttcttccacacgtaacccttccatcaccgcgcgcattgcatatttagtggctgaataaacggataagccttcaccagtgaaatgaccggcaactgaatccgtggtaatgatatgaccactcttttgctgttccattaaaggtaaggcatatttaatgccatatagcgcacctttgatattaatatcaatcatagcctcccactcatcgactttaccatcgcgtagcattgagacgggcattaagccagcattattgaatagcacatcaattctaccaaatttagcgattgtcaattcgattaaggcttgcatgtctgctaattgcgtcacatccgtttgctgataaataacctcagtgtcgtattgagcggttaacgccgccaacgcacttgttcgtcgagccgctaaaacaagttttgcacctttggctgctaataaggtggccgtctctttaccaatcccacttgatgcaccggtaatcacaacgactttattttgaatatcattcatttcttttcccctcactttttagttgataaggttagtatatcgggtacttcgcaataaacaattacgcactttcaactaactaacgcacctcaaagtaagttttgtgaaatcactaaaaagacgacaacattctttttgaataaatgttatcgccttctttaaatatcgtatttctcatggtctcgataatccaactgcacatcatcaccattgctctgtaaaaagtcgattctatcttcgccccacttggccatcattcctaggacggaaaccaatgatttgccgtacgcagaaatcgcatactccacgtgtgggggttcgttagaaacttttcgagtaatgatgccatctcgttccaattcacgtaattgatcggttaaaactttggctgaaattccctgaacgactcttttaagttcggccggtctttgaggtcctgccacaagatgacagagaatcaacggtttccatttcattccaatcactgataaagtcattaaaacaccgttggtataatttttttgtggctcgttcaaggcctttcctccacttcttgatgctgatttgtttgtctatcataccatcaaaaaaaggatcaggacaatcttatctgtcctaatccctgattaattattctggtcgataagccgctttagcagcgttcatcgccgaccatgccttaggccagccgatataaaatgataaatgcgtaatcacttcgacaatttcagcttcagtaatgccgttttccttatcaatctttaaatgcgctggtaattgttcaaaattaccacctgaaatcaaggcactgatggtgattaaactccgttgatgtgctggtaactctgattcacgcgaccaaacttgcccgaataaaacatcgtcgtttaattcagcgaatttaggtgcaaaatcacccaatagatcgcggcctgctgtttgtttctttgccattttaaaaacccctttctgaattaaagtgcgtcataaagcgcatttgaaacagcttctaaccattctggtgtgccggcagtgatggcgacatgactaaaccagctatccttaatggccccatgccagtgtttgatgccgtctttagtaacaatcacatctcctgggactaagtgttgtgctgctttaccttcttcttgataccagccttcgccaccagtcaccaatagaatttggtacccagcatgatggatgtgccaattgttccgacaaccaggttcaaacgtgacattcccgacaccgacattcacgtctggttcgttcactaacattgataaataactttgaccgacgaagaagtcttgataagccacattagcttctccaactgggaataattgtttttcttttaattgttcattcttaaccattctaataacctcactttattaggattcaaatcgttgtaaatacgtttcaaaactctctgcttgatcgatactctgatccaatttaccatcataccaatcaattttacgcgttaggatctgtaaatttgcttggcgctcagccaattcggcttcagcttgagcctttgttttttgcaataaagctttgcgcgcttcaatcgtcgcgtctccttgagcccgcaatgcaacatattgctttaattctgtaatccgcataccggtcccttttagatggagtataaacccgacccacttaacgtcctctaatgtataaaagcggacaccggccgcatcgcgttgcggcataatcaagccttggtcttcatagtaacgtaatgtgtaagtcgacaaaccaaccaatttagcaaactcgccgattttgtactgctcttgtgccatcgacatccctcctacaaaaatagcttataccttagagtatactataaggcaagttttttaataaataggacgatcgccatcaatattcggctgattaatgccccaacttgccccaattcctttttcaggatgattaactaaatcaacaacaacttgcgcgatactccgtcgtgaaataatcgtccctttaaacggtgttcccttttcagttaattcgtaatcgatccgatcttcattggtcatataggcacaacgtaaaatggtatagttaagcgaagattgttcaacaatcttcgccgcccgccgcacttcatgaccgactgcttgttcattccactcaccaaaagcacctggcacttcatgatacaagcctaatccactgatatagattaatcgtttgatgcccgctgcagtcattgtcgcgacaacgttttgcattaatggttcgaactgcccgcctaaatttgcgtaaacgatatcgaccccagctaaactgtctgccaacagctcttgatccaacacatcaccttcaataaccgtgacatgtggattttgtgctaatgcgcttagccgttcagcgtgccgtaaatatagcacgagctcatgttgattttctttcaacagttgctcaataactaactgggccacttgtccggctgcccctaatactaaaatgcgactcattttaatcaccccttcttcaatgtctttagcatattccttaaagtacactcgaaggcaagccatttttcaaatttaattggtctaggttgctacttgactttcaaattaaattgactaaaatgaaagttgttattaattataatcattataaagtaataaaaagtattggaggcttcaccttgtcaaaaaaattatcactcgcccaaaaaattaacgtgatgcgggctagcgtcatgggtgccaatgatgggattttatccgtcgccggaattgttatcggtgttgccggcgctacaagcaatagcttcgccatcttcatttcgggaattgccggaatgattgctggaacgatctcaatggcgatgggcgaatacgtctctgtcagcacgcaaaaagacgcacaggaaatggcaatcattaatacgaaattgaatttaaacagtaattatgcgtctcagatggcttttgttcggcaaaaatacgtcaacactgggattgatcctgaacttgccgatcgggctacacacgaaatgatgactgctgatccgttgacgactgtcgtacgtgaaaaatatgggtttgtcccgactgcttttaccagtccttacgcagccgctgttgcgtcattcatctcatttccaatcggttctattttgccactagccgcaatcaccttattaccccaaaccattcgcgtgcaagccaccatcattgcagtgatgattgcccttgcgctaaccggctacagtgcagccgctctcggcaaagcgaatcgttcaaaagccatgttgcgcaatgtgctttccggattattaaccatggtagtcacttacgctattgggacattattcaaacaataatcgcttagaaaggatttttttatgacccctcttaaagccccactcaaaacaactgaaaaaccccatcaaacgatggaagaaaagatgaatacccttcgagccggcgttctaggttctaatgacgggattctaaccgttgtcggtgtgctctttagtgttgccgccgcaacaaccaataatttcaccatttttatcgctggacttgctgatttattagcctgtgctttttcaatggcggcgggtgaatatgcttcagttagttcgcaaagtgacacggaaaaagccgctgttgccattgaacaagcacgcttaaaaacagctaaagatgatcaaattaaagaagtccaagctttttacgaagccaaaggtgtcacttctgaaacggcactcgcaatcgctaaggacttaatgcataagaagcctttagcaacaattgttaatgttaaatatgacctagagcttggccattatatgaacccgtgggccgcagcgtttgcatccctcttctcagccgctttcggtggcgtcttcccccttgtgacaatgattctactgcctgaagcctacaagatgaccggcacaatcattgccgtcaccatcgcggtttccattaccgcgtttatcagcgctaaactgggcgatggcaaagtcaaagtctccattattcggaacatcctaattggtttaattacaatggccattcactacgggattggccaactcttctaaagaaatccgtcatcatttgttctaatctaacttaaattcagccacaaaaaaaggcgtcgagcttaaattaacttttagctcgatgcctttttgcttatctaattttagttctcaagaactgggcaattttttcatggccagcatcattgggatggagactgtctaaactcagctcagccgcttgttgtgcatccgcaaatgacaacgctgattcgttaaacaaactgatatgctgaacgccaaacaagtccgtcacttgcgcaatcgcttgttcataattttgttgctgataaccgccttgattgacggccgaaaagaagtcagtcccaatgtgaacgtgcgagataaaataaaccgtcgcttgtgggtaacgtttcgtaatctgcccaagtaatttttgtagtgcgccgtagaatgttactgtggactgatcaccaaattgaccaagtggtacatcacgaccaaagtcattcacacccgcataaatcaataataaatccgttgattcaggaatggcttgccagcgttcaaccatcggatcatacggttgggcaatcgtcgaccccgaaattccgagattggtgattgtgggaattgtgagccattctgctaaccactggtagtaccatttgtgtgcgtaatgattacgttgatccgtgatgctatcaccaagtaccgttaaatgttgatattgtgtcatttgctacttcgctcctaattctgagtaatccgtcagttgccaactaaattgatcccaataattggtttgctttaatgttttaagcgcattgaattcggctagccgattcgtcgtcagacgactcttatgccgtaactctgccgataaatacccaatatggcttaagatcaccggcgtacctaccaaatttttctgcgtcagttgccgtttgatttcctgtggcgttaaatacggtgtttgttgcgccgttatcaacgtcccagtcgttaaaacggcatattccgacattaatagcaggtaggccgcttgttctgtcggtcttaaatgcgccgtttcattgcgaacagggacatgatacgtttgcgctagttctagaacaattgcatagatttcaggcgttaacgttgccacaaaatggtgcgatgtcaaatgcgtgagttgtaacccactctccaaaaagcggtcaatctgcgcttgaaactcacgcttaacatcagtaatggccaactgttttggatgagtttgtaaggtttgataagcatgacaaaacccagccggggttaccaagctgggaatcgtcagtggctgactaattgggcggtctttgtcgaggaccaagtgcaatcccattgccataatcccatgttgctgggcgagtgccgcactcatttcaaaatgaggcgatgtcacttgcgcattagtggtagaaatcacgccagtttttaagccagttatgattgcgcgcgaaatcggtatggtcatcccgaaatcatcagattcaataatgattggttgcatcttaacccacctattctgccgctaagtcgaactgtccaataatggtgtcagtcgtaactgttgttggtagtggctctgctggtgcaaaggtggcgttgctgctgacgaccatgatagtcgttgccttttgggcggctgctagttgttgccagtcaatatcaacaatcgcttcgccagctttgacacgatcacccgcttcaacgtgcatcgtaaatggcgcgcccttcaattcaacggtatcaatccccatatgaatcagaatctcaacattttgttttgttgtaatcatgatggcgtgtttagtggggaaaatcgaactaacaacaccatcaattggtgcgctaatcgttgtttgccgttcatcaggggtaatggcaaagccatcgccaactgccttgcttgcaaatacttcatcggtaacttgttcaattggtaaataactgccagcaacgggggctgttacctgtccaactggtccttttttcaaaaaattaaacatcgttcttcctcttttcttaaacccgcatcatgatagcttcataaggtcgtaaagtgatttgctgaccatcaaactgcggttgttcgtaattatccatgagcacgtccttgacgtgtggtattgaacggacttgtgtttgaccagtaaaattagccatcacgcgaatcgtttcagtatctaggtgtcgttgataagtgtaaaccgcttcgtcctctggttcaaataattggtagtccccttcaattaaaactggcataagcttacgcattcgcactaattcttgatagaatgcaaagacactattgggttcatgaatcttagcggcaactgagtaatcatcgtgctcaaccggcattaaccatggtgtcccagtcgtaaacccgtgatgcgccgtttgatcccattgcatcggaattcgacagttctcgcgtgatttctgctgtaaaatcttaatcgctaacgcttcatcaatcccatcgcttagcatttgatggtaagcattgatggattcagcgtcttgatattggtcaatggcggtgaagttcgcgttcttcatcgcaatttcttccccttgataaatatacggtgtgccttgtaagccaaattcgactaatgctaataatttagcggattgatcgcggtattgaccgtcatccaagaagcgcgaaacggcacgcggctgatcatgatttgaccagaataatgcgttccaaccaccaccggcagccatccccgtttgccaatcactaagcacccgttttagatcagacagccgataatcgcctagtgtccattttttgccaccggtataatcaaccttcacatgatggaaggtaaacgccatcgataactcttcacgggctggattggtataacgaatcgcttcatcaattggggttgaggaaagttccccaaccgtgacaaattggttcgggccaaagaccttttcgtacatttcatgaatgtattcgtgcacatgtggtccattcgtatagaaattgcgcccatcatcgcttggcgttttaaacgtatcattcgggaagtctttatccttcgagatattgttaattacgtctaaccgtagcccatcaatcccaaggtctgcccagaattgcatcattttaaaaatctcggcccgcaagtgttcattccgccagttcaaatctggcatgctcttttcgtataggtgaagataatattgatcaagtgctggcacatattcccaagcactgccactaaacttggataaccaattatttggttcgtgtccatctactggatcacgccacaaataataatcatggtacggattatccttgcctttaagactctcttggaaccagcggtgttgatcagaagtatggttgaccaccatatccatcatgattttaatcccacgtttatgggcttcatttaagagtcgttcaaaatcggttaaatcaccaaaaatgggatcaatgtggtaatagtccgcaatatcataaccgttatcacgaccgggggaaacatacattggcgtcaaccaaatcaattcaatcccaagattttgtaaataatctaaccgttgaataatgccgttgatatccccgattccgtcaccgttggcatcttgaaagctccgcggataaatttgataaactgttgctttttgccaccatgccatacgatatctctcctatttcagtcgtttattttgctgttcctggtttttgtggtttagccattgcttcaccagctgtcatttgatcgttataaccccaaacgagcgttacaataaatggcacaatcgttgcaaccgctgatgatgcaatgaaaatccataagtttgataaatctgctgggtgttttggatctaagaatgatgcaaagccgatccacgaccccgcgaaaccgaacatattaccatggaataacccactgacaaatccgccagcggctgaaccaattaaaccggcaatgaagacgcgtcggaacttcaagttgaccccataaatagcaggttctgtaaccccacagaatgctgaaatcgcaccagcaaatgataattcttttaaagctgttttacgggtcttaatcgcaacagctaaaacagcggccccttgtgcaatcatcgttgtgcttaaaatcgcgttcaagtaactgtgacccgttgcggcaacatcgttggcaataattggtaagatcccccagtgtaatccgaagataacaagcacttgatagaatccaccgattaataacccagataaccaaccactctttaataataagaattgaatcccgaatgctaaaccatttgataaccaaataatagcaggccctgtgatgtaaagcgtaatggcagaaacgactgcaatcacaatcaatggtgtaaagataatttgtaagtagcctggtaaccagcccttaacccatttggttaatttagcgaccaaccaagccgcgagaatcattggaaaaatcgaatacgtgtagttaaccattgggaagtttaatgacccaatttcaagtaaagatttcccgtttaaagccactaatgaaggatgcaccagaacaccaccgataacagcggttaaaactggatcacccttcaatttcttagcggcagtgaacccaactaacatgggcaagaagtagaaaacagaatcacccatcgcacttaagacgatgtatgcttcactcttagcacttaatagcgccccaagttgtggcatcgttagcattgccaagacaccttttaaaatcccaccagcagctaagataccgacaatcggactcatcgcaccggtaatcacgccgattaattgattaaaggcttctttaacatggccccatggcgttaaattttgttggcgcgttgttgcagccacaacttgggccgtttcatcttcgtcagcaaactctgtcccgatttctgcaatcacggcatcataaacggcagtgacttggttgccaatgaccacttggtattgcccagaggccttttgaacgttaatgaccccatctaatgctttaatttcttcggtcttcgcttttgattcgtcctttagataaaaacgaagccgtgtaatacagtgaattaaactatcgatattttctttgcccccgacaccggcgacaattgcctgtgcgagttgtgaataatccttttgagccataataattcctcccgaatcttattgaattaaaagtagcatgaataaaagcgctttcttagtacaccgtaatcatatatcatgtacgtacaagttgtcaaacctttttaaaaccgttttcttgttagcgcttaatctaaccttgcaacttcaccgaatccccgttatgataggaatgagaaaacaaattggagaatatcgaatggctaaaaaatatgaaatgatttatcgagatctcgtgcgcaagattacgcaccaactctatcaaagcggcactttcttaccaagtgaaaatgaactcactgaactctacggtgcctcgcgtgaaaccgtccgtaaagcattaggtagtctacttgaaaatggctttatccataaaattaaagggaaaggctctttggttctcggtctagacaagtatgcttttccgatttcgggattgaccagttatcgtgaattagatagtcttttcgatatgcatactgacactcaagtcttgcaattaacacagacgaccgttccccaaacccttttccatcttgaatctgaagagcagttacctgccacttacattcaacggctgcgcgtcgttaacggtcagcccctggtaatcgataatgactacgtcttaactagcatagtcccccacatttcaaaaggggttgcacaagactcactctatcgttactttgaagaaacactcaaactcgaaattgggtatggcagtaaggagttcacggtgattcccgccactgaagaacagtgtcagatactgaacctaccgcctaacagctccgtagtcagtgttaaaggtgtcacccatctacaagataataccctccttcaattcaccgaatcgattcaccgtgccgataagtttaaatttatcgaacatgctcggcgtaaaattatctagtcaaaaaaaacgacacccaccggctgagagttgccagatgggtgtcttttttttatttgaccgcctgtgttttaaaaacagcgatttgatttaaaagttcactaatgcgtgttcgatcactcttttgttgttgacggctcgttgtgagtttctgatataagtttaactcatcaccctcgttgaaggcggtgaccatggcttcagcggacgagacgtaatcagtcattactaattgtaactgacggttaatttctcgtaattcttttggcggatttagtaatgtgacttgatcaataaattgtttaaaaacccgtaagttacgttgaaaatattcgtttaacgattccaaattttcgcccaccagacagcgccctttgatgatgttcttgctggtccgggtgtactcactaaatactgtttcaaacacgataaaccgttctaaaaattgattccaccgtacgatgtattcctgagtcgatagttgatccgctttgacactcatggtcgttccccctttaatataatatctaaatgcctatcatgagtataaatatatactaaatacagataaaaggctaattattagcctttgttaccgataacgatttcaaattgcgtttcattttacaaataaaacatgacgtcctatagttaaggcaagccaaaaaaaggatctgattacttgtccaaccaacgttatctatctggaacagcactaaaactatttatattcaccctactagccggcacgttcacaatgtctatcagccaatctgccctttcaactgcttatccaactttaatggcctattttgatttatcagccacaactgttcaatggctgacaaccggttttatgctcgtaatgtgtgtcatgatgccgattagtccttggttattaaacaacatcccattcaaacgactctacatggggattttaagtttatttactattggaacgctattaattgtcttcgctaatcagttcggttgggtattgttcgggcgggcgttggaagccatcgcagtaggtgttttatttccatcgtttcaaactgtcttattaaccattactgctgaaaatcaacggggccaaattatgggcctggctggtttagtaatgggctctgcactagcttgtgggccgattatttcagggattattctcaactacttcagctggcgaggactattcatcgcctttattctgattatcttaaccgtgttagcaacagctaacttcactatttctgatgttatgccggctaagccctatcaccttgatggtctttccgttttatgtacaactggattaatcggtttattatatgtcatcagtagcgctaatcatcccactatcaacccaatcgggctctggggtatcggattagtgagctgcctagcactgggttattttgtctaccggcaactcacccagacaacgccacttcttaatttacatattctcagttaccttaactacgatattgcggtcggattgactgctatttcctatatttcattgattgtcaccacagtcatctacccattatattttcaagctcaattgaagttgacgccgcttctttcaggattagcattggtccctgctgccgttgtgttaagccttttgaatccactcgcgggccggttagctgataaaattggctttaaaccgaccttactcgttggcctaaccatgattagcattggatggctagctttgattggcttctaccaatggctgtcattaccattgatgatcctgtgtgcctgtttcatcgaaggcggcaacgcatttgtcatgatgcctgctgttacacttggtgctaatagcctgccggatcaagtgctcgctgacggcactgccgtcacaaccacgattcgtcaaattgcgggcgcgctgggcgtcacccttgcaactctccttttaagtgtcgccggttaccaagtcgtatttattagtttgctcggcctgaccttaattggtcttggcttagccactcaactacaccccaaataagccacaataaaaagcagattagcgatgatgattgtcatcgttaacctgcttttttaataccagcgttgcttaattaagataagtccccatgtcattaaactaaatgttgaaatgatcgcgccgataattagtcccggcgcacgatagactaagcgaacttggttagtccctttctcaagtggcactgcaagcatattgcccatgactcgtcgtgtacgaactttttgatgattgacttgcgcatgccaaccactgtcatatggcacacttagataaagtaattgatcagcggtcttagctggtactacaccagcaatccgaccattatctgccgacagttgttttaggtcgatctttaagcgttgttgtgccaactgatcaaaagcttgatcgaaatgagcctggtttaaactagccacctgaatcttacgaaaggctttaggttgccgactggtaattgtcagcgttagttgttgccctttttgatagcgacccaaaccaataatcgtggtcccattcaattcaatcggtactttatgtgttcggccattaattttcactttcagctttgataagttttgttgcggcaagtatagataagcatatccacttgtcttaacttgcgttgtaaacgtaatttgccgacgtttttgcgcttgtaaatctaattgattatattgataaaatggtgtcgtttgtcctgtcatcgcttgcataattcgatcttgattttcaaacggttcatgtgctttcaaagccacgtgtgctagctggtcattaaccgcaaaccctaagcctaacgttttatggggttgtgtcacaacctgtccttgcttagcaattaggtcatattgattggcaaatagtaggtcagtcagcacagtatgcccaatcccgttaatccgccgggcattcttactataaaaaccgagattaaccaacatcgtccgcatccgctcatcaagtgtcgaagaataattgtttaatgtatactgtccaaaggtcaacgcatcattgtacccataatacggttccttaaacgctttttttaagagaatcgcttggttattaacgcgatagaaatcaggtgtttgccgttcaagctgttcaaagagtgctgcttggcgttggtattgttgcgcataaacaacttgatcgcccatcggtaacttagtggtcgtcaagcggccattaatcaccagttcactaaacgtcaatacggctcccagaccaatcacccatggttgccaacgtgctcctttttgccacgctgcaaaaataacgctagccaaaaccattagtccgattaacaaccagagcgattgtttctgcacaccacgtacatgtggcccatagtagagcgccaactggccaatgctgagcaagccaccgactatcaaaataaccaggcgtttcgtttgacgtttaccgattggttcaatacttgcttcataggcaattttgatgagaacaaatgccatcaaataggtattccgatatggaaacccttctggttgctggaacatgtgccacatcgtattaaatgtcgttacccagaaacttaacgctaaactaacaattaaaaagccgttcgaccactttgcttgccgtcgaatggttggtagacagaaataatagaccgcaaataacagcgctaatgtactgataaataaagttggttcatgaattaagcgttgcgtataatggctgccgccgacttgaaattggctcaaaacttcccagccaaactgcggggttggataaaaactggttgcagcgattgtctttttcccagtcttcaacattccaagtaacgacggcaataatacaactgctgttgtgccccccgcaatcaatgaggcccaacaaaactgccagatagcctgccgccagtgaaccactagttgccaccaagactgttggggttgtttccatttgattaacaaactaattgcatacaaaacggcaaatagacatgacatataacccaagtaatagttggtaaagatagtggcaaccaacatccagatatataagccaggacgcccttttaaaaatagccgttctaatcctaagatgaccagtgggaggaaaatcagagcgtctaaccacattaggttataaaagttcattgccacaaagccacttaaactataagctgttgcaaaaattagcgcggaaaaatgatattcaggctgacgcgtctttagaaaatgggccatcgttaaacccattgccccaatcttcaaaataatgacatacccaaccaccactggcaactggctattcgaccaaaataggagcagtaaattaaaaggactgattaaataataagccgctagcggtaatatatcgccacccagtgaaagcgaaaatgaatacgtactgaaattcatctgggccatttgccgtttaaactctgccaaaaagggcatatattgggtaccgagatcactaatcaataaattatgccgtccaaatggcactatttggagcattgcatatagccccaccattaataacatgggaactagcacactcaataaatagtaactgacagctgttttatttgttctcttcatctgactcacttcttttgccttttttatagaataatacacactctaaacaaaataagccacccagacaatttgtctaggtgacttattagtaagttgcttacttcatcataccgagggtgaccccaccgacaatgactaataaacagccaagtgtgacgtaaaccatttcttttttcgttttttgttcacccaataggtaaatactaccgattgttgagatgataatgccacattgtgataatgaatagctaattgctagaccaatatcattcattgaaatcaacataaataagttcccaagaccccataataaaccagtactaatgttgagtgctgttttcttattgaagaccgctgtcccaatgccaacaccggcaaagattgcagcaccgacgaacattccaattgcttgtggtaaaacaattgatgttgcgccaatgtgtgaccagttaacgatgattgtgtaaccaccataaccgattgttgataagattaatgctctaaaaccacgtgcaaattgtgtatcttctttagcagcaacactgctcttcggatccttcattgaagttaacgtggcaccagcgattaagatcactaatgcagtaatcccgaagatgtaatcgtgcgttgtcttccattcatggaataacaaagcacctgctaaagtgtttacaatcaattgcatcccggttgataatgggactgtcttagaaacacccatcgcttgcattgattggaactgttgtccttgaccaatgctccagaataaaccggaaatgataccgattaccataatccgtaagtttaaagcgggttgtaatactaaaaaggtaccgattccaaaaaccagcgcaccaattgtcattcctaaggtttgttgataggcattcccgccaagtttgccactcactaacccgatactaccccatgcaagtgcagggattaatgcaattaaaatagccatttataaattcctcttcttctctaaagtacaagaatccattatacatagttttatatccgctggctagtaggaaaacggcaccattcaatcgttactagccttcactaccgttatgtaagcaactgtcccagtcgtgattgcgcttacgtaaattttacgtaaaaaagcgttttttttagtaaaaaaaatcaacgataagcgttttcttaccgttgatagccttaatgttttcgctttgcatgttgtaggacttgatataacaggacgccaatcatcacccctaatgtattaaacatgagatcatcaatatctgccatgccagttcctaaaacaaactgggcggattcaatacacagggataacagagccccttcaataatcgtaatcaaccgatcccctttgcgctgtgtcaatgaccgtcgcaataaaccaaacgggataaaccacgcaatgttcccgtagaagttataccaataatcaatctgggcgggcgcttgccgtaacttgaaagtctcaacaaacggtgtcaaattaatttggctaagtggtcgttgcaaatggaactgcatttgccacggataataaatatgccgtaaaaccgttaacgagaccaataaggcaatataaaacacaaataacaatagtttcagttctgggagaagctgtattttgcgtcgtttcattaataagtaccccaaccggcacacaataaaaaccaaacaatacaaaatcgtcttatctaaactctccaccgtcaatttgatgagtggtaaatgattatactgttccccccaagggaggatccattgttcataaatacgcccaagaaataccaaaaaaccaacctcacttattccactaatttaacctatctgttcattattcaatgagtaattaagtccattatagctgttttttttcaataaataacgcttaattactcgactaaagtgaatcttaaactattaggtatcgactgcccaactttagcccgatgtgtgcctactgtgctatgctataatagaaattactataacttgaaacaggagccttttatgaaagttctattatattttgaaagtgaaaaattactcgctaaatctggaattgggcgggcgttggatcatcaaaaacgcgcgttaaccgaaatggggattgactatacgcttgatccgaatgatcaagattacgatatcttacatatcaatacatacggactcaaaagccgcagtgtcatcaaaaaggcgcgtaaaatggggaaacccgtcatttatcatgcacattcgaccgaagaagattttcgcaactcctttgttggttccaatcaactcgctccatttgttaaacggtacctcgttagcctctatcaacaagccgaccacttaatcacccccaccccttattcaaaatcattattggaaagctatggtctaaccaaccctatcgctcccatttcaaacggcattgatttagccaagtatcaagccacaccagctaaagaagccgcttttcggaatttcttccatttaaagcctgatcaaaaagtgattatctgcgtcggcctcttctttaaacgcaaagggcttctcgattttgtcgaaatcgccaaaggtctacccgaatacacctttatctggtttggagatgtacccatgtacagtattccagcaaatattcgccggattgtcaaacaggatcatcccgacaacgtcatcttccctggttatatcaaaggcgatattatcgaaggcgcgtatgccaatgctgacttatttttcttcccttcttatgaagagactgaagggattgtcgtcttagaagcccttgcaagtcatcaaaaagtgttggtgcgcgatattccggtttaccatggctggcttgccgatcaacaaaactgctacatgggtcacactaacgcagaattcagtcaactcatccaagcgatggtcactaatgccgttcccgatttaacagctcaaggctaccaaactgcgcagtctaagagtattacagaaatcggccatgaattacaagccgtttatcaacatgttttggcgccagatcaactgaatccaaagtacgatgccatcatgcggcccgcgaaacgttaagtttctgtttaaactttaaactgctatttgcgctaatgccgccctcgggttaaaataaggcattagcgctcttttagttctgttttttgaaaggatgtcacattatttgaaactcacaaaaattaaatcattcctatccacgagattaggcttcatgagtttgttagtctttttattttggctaaaaacgttattcgggtacttcaccgattttaacctcgcagctagtggcttcttacaaattgctattttaatctttaatccggtcgcgacgacgctccttttattcggcatcattctttatgttcgccagccgcatctcagttattggttgggcttgattatctatgccgccaacaccgctcttttatattttaatgtcatctattaccggcaattcaccgattacatgaccatcaacaccatcttagggtattcaaaagtttcggctgggctcagcaaaagttcactggccctcatgaactggcatgatgcgctgtattggattgatattattgtcttagccttgctgattttaaccaaggtcatcaagatcgacaaacacgcatttaatcggtggtgggccttcagtattacctcactggccgtcttattatttggcatcaaccttggcttaagtgaaatcagccgacctcaaattttatcacggacgtttgatcggaactacatcgttaagtacctcggcatcgacaccttcaccgtctacgatgctttcaagactactcagaataatcaagtgcgtgcccaggctgagagttacgacttagatccggtgctcgactttatgaaagagcattacgctgcaccgaacgctgaatacgcaggcgttgccaagggcaagaacgtcattgtcattcatttagagagttttcaacaattcctaatcgactttaagttcgaaggccgcgaagtaacgccatttttaaatagcctctatcatgatcaaaatacattaggttttgaaaacttcttccatcaagttggccaaggtaaaaccagtgatgccgaaaacatgatggaaaccggcgtctacggtctaccacaaggctcagtctttacaacgcttggttcggataacaccttccaagctgccccatcaatcctcaagcaaaacggtgactatacgagtgccgttttccatggtaatgtgggcaccttctggaaccgcaataacgtctacaagaactttggctacaactacttcttcgattcttcctactttaacaccgatcctgataacgtcttacaatacggcttgaaggacaaattattattcggtgaatcgattaagtatctcgaacagctacaacagccgttctacacgaaattcatcaccgtcaccaaccattttccattcccattacccgaaaaagacggtgacttcccccgtgccacaactgataatacagcggtcaacaactattttgcgaccgcccattatcttgaccaatccctagaagagttcttcaattatcttaaagcctctgggctctatgataattcaatgattgtcctctatggtgatcactacggtctttcgaattctgataataaggccttactcagtgtattaggccgcgacccagaaacgtggaccgactacgataacgcccaactacagcgtgtgccttacatgattcacatgaacggtttaaaaggcggtatccaaaaacaatatggtggcgaaatcgatgcgttaccaacaatgcttcacttactcgggattgataataaaaattacgtccaattcggcaccgatttattatcaccacaacatgatcaagtcgtggctttccgaaaccataactttgtcactcctgattacacagtactcgatggcaccatctacaataatcaggatgggacagaagtaactgaaccaacagctaggttgcaaaaacaagtcgctgcttggcagaaacaagtgaaccacgaattgagtttgtcggattcagttaacgaaaagaacctattacgtttctatacaccacaaagttttaaaccagtgaaccctgccgattataactatctgactggctatcaacagcttgtcgatattcaaaataaattaggggctaattcaaccagtttattctcgcaaaatggtgatcaatcgactgttgggctctttaaaaccgatgctccagaattagcgggtgatcaatcaagcctcacggaagtgccaaaatcaaaggccctgaaaaaagagtctgatgcaacagcaactagcgatacggaataatcgtcaaaaaaaaacgcaaggacaacatatattgtccttgcgtttttttgacgttagctaatcacctgcgattgaaaactattaaaaacggattcctgagtcgttgtcatgattacgataatttgaaactgcgctgctaccgctctgacatcatttaataattggcgagcatccgttggtggaagttcatctaagaaatgcttgaccaccacgagttgctggtggcttgctaaaccgcgaatcaattgaatccagaactgatcgactggcggtaattcggtgcccaataaactccgactgcgctttaaatgctgttcaatcaatatttttaacgttggtgcaagctgctttttaggaagcaacaagttatcccaaccggacataaaggggagaatcttaggcgcctcataatcaatgacatatgggggttcaggtgattcaaggctctgctgaatcatctccggttgactaaaatagacctgtccaagtgctaagggttgtttatttagcatttcaatcacgcctttctcattttcctaaagcgagtaacttggcaccaaccaataatgtagactggtgcaattagactgataaatggtgcccatagttgggcgaatacttgattggttaaattctgcttggtgctctcatgcaaaatcggattcaataacgaatgactactaaagtcagtcagatgatttttaaataacggttgaaatgctcggggaccttgtattggtcgcaacggcttttgtagccactgttgattaatcagctctaatccgcgccaatagtaggaattgactaataaccaacctaaaatcactgtcacgcttgcgctgattagtaagcaaagcgccgttaacgtataataattgacaattgtatgtcgcgaccaattcgcactagtgaaagtatcgatatcctgacgcatcttcttaaacgcttgccaagtcaaaataccaatcacaagtgcgataacgatagtcagcactaccgcgataaattgatagcgtcccagtaagacttctttactttgaaccagatgtgtcagggggttagtcccctctttagttgtgttaaagttggctaattgctttttcaactggttgaggtcatgtcgttctaaactgatcaagctcagcgcaatcagcatgacgcctaaaaagaggcaatccacgagatagattaacaaagattggcgtaaataataccgaatattagctggaattgatttaatgaagaacatgacccacctcctaataaagatagtgtaaaactaaagtatgaaaattatatgaactctgtggtaaaaattaaaaaaaacgccttaattaagacgtttttttagttcccttaaattgtcttttcttttctttgaatcattaaccaataaacaagtgctgtcagccccattgcgataaacgttgcccccgtataagcgtgaataatcgcgaattgatttaagaccaagtagctgaccaccccaatgacccatgcaatcatggctgtcagatgatatcctttggtgtaccagtatggtccagcaacttcattgagcgcaccaacattgtagtgccgccgtctaataatgaagtaatccaccaagaaaactgcgatttcaggtcctaagaacatcccaatactatcaaggaaggtttcgaaagtggttaaaaatgaggcaacatagaccggaataaaggtcatcaccgttgccaataacgtcacgacccacaatgccggcgttaatttaaatttcggaaaaatattggttaaagccgatcccgcagccattagattcaccgcattagctgtcgtactggtaatcacgatcactaataacgctaaaacacctaaccctaatttggccgcaatggtgcttggatccgcgttgttcgggtcaaaatgatttaacgtaatcgctgtggcaattgtcgccgttaacccgatgaaagcaaaccagaacaggccaatattggcgcctaagaatgaatagcctgtggctgctttcttgttctttgaaaaacgactgaagtccgcagcagcggttacccatgcaaggttaaacgctgctaggatatcgaccgccttcccaaattcaagccgcaagttgctggctggtcgccacgccactaagtctttgaacggtaccattttgaagacaatgattgattcccaagtgactaagataatcactaagatgatgccaattcgttcaatccagcggacggatttttcaccgagcgaaatactgattaaatgcaggacagacataattagaatcccaacaatcaagctcatccggttagtggctgcatcgttgcctgaccagcccatgatttccttgatgatgaagctcactgaagttgctgcaatatacgtattcaccgcagcccaaccgatgaattgtaccacattgataatcgatggcaagacggatcccttcacgccaaatgaggcccgcgttagccccatcgcccccacaccagtttgataccccatgtaggaggccagtgcaagcaagacgtacgataaacagccaacaactagtaacaacgtagacccttgaatcaagccagttgccgcaataatgccgccgataaaccaagtgccgttattcgcatttgcaccaatccaagttgcgaacaaatcccaactgcccatcgttcgtgcgtccttggatactgcatgaattgtttgttgctttgtcattttgataccctccacttggttaattgcattaaaaaaagacctactcctagacagagcaggtccactaatgtacttgttaaccgctcctttgtcagcctcactggactgcccttaaaaggatttatatttataagcattgtattaaacttacttgccaaagtcaactcatgattgttatactcactaataaaaaaagcgaggttggataaaatgctcattcaaaacgtgcacattgagaatcaagaatcattgcagtcaatcagaattgaaaacgggatcattacagcaattgaggcacagctaataccgcatcctaatgagcaagtcatcgacggacatggtcaattggcattaccgccatttgttgatcctcacgtccatctcgattcaactctcaccgccggccagcctgaatggaatgaatctggaaccttgtttgatggcattcggatttggtccgaacgcaaaaaggatttaacccacgacgacgtcaaacaccgcgcaattcaagcactgaaattacaagccagccatgggattcaattcgtccgctcacacgttgacgtgactgatccagacttagttgcgctcaaagccttaatcgaggttcgcgaagaagtcaaggattggatgacgttgcaactggtagcctttcctcaagaagggattctttcttttccaaatggcaaagcattaatgaccaaagctgcccaattaggggttgatgcaatcggtgctattccacatttcgaatttaatcgcgaatatgccgtcgaatccttgaagtttgcttttgaactcgctcaagaatatgatttactattcgacgcacataccgatgaaattgatgatcccaattcacgtagtcttgaaacagtcgcgactctcgcccttgaaacggggatgaaagacaaagtgacggcttcacacacaactgccatgggctgttacaacgatgcctatatgtacaaattgatgcggctgttaaaaatggcggatttaaacttcatcgccaacccacttgtcaacctatttctcggtggccgttttgacacttatccgaagcgccgtggtttgacgcgcgtaaaagaactgactgccaacgggctaaacgtcgcttttggtgaagatgatattcaagatccatggtacccaatgggcgatggcaacatgcttgatgtgttgtatagtggcctactggcaacccaaatcatgggccatactgaaatcatgaatgcctatcgattcattacttacaatggtgctcgtgcaatgcacgtccttgaccaatatggtctcgaagtgggtaaacccgcccacctgattctaatggatagcgacaacttctacgaggctctcaacaagcgcgccgctgttaccctctcaatgcacgctggcgaaatcatcagtgaaacccaaccagctcaaacgcaattgcatatttaatctaaaaaataggcgtcacgacaatttaatccttgtcgtgacgcctatttaaattggtttagctttcacttgtcacaatcgtttcatctgggaaagttaaggtaaaagtggtcccttgttcaggaatactttggacctcaatcgtcccataatgtaactggacgagttggtggacaatcgccaaccctaaaccagattcaccatatttggtattcttacgtgatggatctgctttgtaataccgttcccaaatatttttgacttgttcgtccgtcattccgataccggtatcgctaatcgttaagattgtttcgtggaaaccagcttccgcagtcaccgtaatttgcccattttctgtaaactgaatggcattttgcatgatgttaaacatcacttggacaaaacggtcatagtcggcatagattgggacattctcttgggcgtccaagatgagcgtatcaccggcttcagtcgccttcttctcgaattgctcttgaatattctggatagcttccaccgcattaaacgtttgcgggttcaatttaatttggttagtccgaatcttttcataatccaggttctcgttgactaagcgaatgagtcggttggtttcattttgcattaatgaaatactcttggcgcgcatctcttctggaatcgcatcatattgcaacccttctaacagacccttaacggtcgttaaaggcgtccgcatttcgtgagcagcgtcggccatgaattgccgccggcgatcttcttgccgcttaatttcctcttcagattcattcaacgaatgcaccatctcattaaaatcggtggccaaatcatccaattcatctttaccaggattcttaatctgaacattaaaatctccttcagcaactaggtgggtcgcatttcgtaagcgattaatccgacaaatttgataccgtgctaagacgtaactcaacagaatcccaccgattgtcgatagtaaaaaggcaatcaagaggttcttgcgcatcgttgtcaaaccagatttaacggtttgtagtggtgctgccaccccaatcacgtaaatcagtttgttattgtaaaaaacgggtttgaagaccactaactgttcttgcttattgttattcacttggtgcgaatcacgacttaagctcagccgttgaatctggccattctttaaatgtttccaatattgtttcttgaccgaaactttaggatccggggtaggatacaccatctcgttttcggcgttaaagaaattaaacccaacgtgttgttgggaaaggatttgttgactatcaataatgaattgggtcgacaaggccgcttgagacccctgtttgaaagcttcacgttcaatcacatccgcgtaaccttctagttgatcccaggtgctctcataagcggtccttgtcgaatattgcgtaaacgcaatccccacaataataatggtcgtcataatgacgccgaaaaatgccaacatccattgataaataagcttcattcgcgcgctgcgtctgaatcatcaaatttataaccgacaccccaaacggtctgaatcacttgtggtcctactttttcaatcttttgacgtaacttcttgatatgcgcatcaactgttcgttcgtcaccgaagtattggtaatcccacacaagttctaataattgttcccgtgagaaaacttgacggggatttttagctaacgtcttcaataaatcgaattcttttggcgttaaatctaaaattggtttgtccaataaataagtctcacgcgttttagaactcaacttaaagtgtgttgtttgtacatcaaaatctgaattttcagccgcttgttgtacgttttcttcagctgcttcgacttgttcatcaatcaactcagcacggcgatgtaaggctttaatccgtgcaatcagtgtgattggactaaagggttttgtcacataatcatcagcaccgagttcaaggccaagcacttgatcactttcagaatcgcgcgccgtcaacataataattggtactgtcttcgacaactcgcggattttttgggcgacttgcattccgtctaaacccggtaaatttaaatcaagcgtgataatgtcccaactctctggatcgacactaaaggcttccactgcttcattgccgtcgtaagcgaaatgggcatcccaagcttctttttggaaaaacatactcatcatttctgatacggatttgttatcttctaccattaaaattttcattagaattccttctctttttacgttgctatgtctatattatacagtagataaaccaattacggatgaataatatatgaagaagtgatgaaaatcaaacgcatcacggttcccgtttgcatggtatcgctaagcatgatagcatgttaagcagatatcattatttaggaggccccattttgacttataaaggactagtatttttcgatcttgacggtacactttacaacgaacattctgaagtagatgcagctgttgcgattgcactccgccaattacgcgccaacaactacttaccaatcattgcgaccggtcgctcaccgcttgaaattcaagatgcacttgcaaaaaccggcatcgattcattcatttgtttaaatgggagcttcattcaatatgaaggtcaacctgtttataaaggcactattccaacgcccgtgattgaaaaaaccgtcgcaattgctaatgctgctgacgaagccatcgctttttataatgaagaagcaatccggattacggctgtaactcaacccggcaaagatgcctacaagtttgtcaacgcccccgtccccgaagttgatccagactattacttgaatcattcagtctacatgatgttgattctcacaaacgacaatgacaaggcctatacagaaacactaagtaccgacttaacattctaccgcaacacaccgaactcaattgatacggttgaaaaagattgttcaaaacaaaccggtattaaagaattgattcgctcacaaaacttaatgggcatcccaacttatgcgtttggcgatggtacaaacgacttaccaatgctcgacttcgtagactatcccaccgttatgggcaatggtattccggaagctaaagccaaggctaaatacattacttctaagaatactgaaggtggcattattgagggtttacgccactggggcttaatttaatcacttaactaatccgcgccataacggctcaatcactgtcatggcgctttttttatcttgacgcttctcagtagaccgattaaaattagaatcatctcacttaaaaaggagttactaatgacacaacattcactctttgccaaaaaacaaatcgacgtgaaccaatttaaaaatagtacactagaacgccatttaaccgcctttggtttaaccgccatgggggttggtgcagtcgtcggcgccggtatttttatcacaccagggattatcgccgctaaatatgctggacccggtgcgatgctgtcttacctgctcgctgcagtcgtctgcgcaatggctgccctttgttattcagaattcgcttctacaattcccttggccggtagtgcctacacatacgtctacaccgtcttcggtgaattaatcgcgtggattctaggttgggcacttatttccgaatatctcttcgcagtcgcctcagtggccgtcagttggtcagcctacttccaaaatctaattgctggctttggattacacttacctaccttcttatcgactgcatggacgcctggccaccctggtggtattaatttaattgccggtttaattacgttattgattgggttcttactatcaaatggcttacgcgaatcaacacggattaatacgattatggttggtgtgaaagtcgctgtcatcgtaattttccttggcgttgccattttctatgtgaaaccagccaacttcaaaccgttcttaccatttggtgctggtggcattctttctggggcagcattagcattttacgcctacatcggctttgatgccgtttcaaccgcatcagaagaagttgtcaatccgcaacgtgatatgccaatcgggattatcgcttcattattgattgcttcattattgtatgccgcagttgccaccgtcctcgttggcgtcgtgcactatacaaaactcaacgttggtgaccccgttgcttttgcgcttcaattgatgcatcaaaactgggttgctgggattgttgccctgggagcagttgccggtatgacaactgtcctactcgttatgacctacggcggaacacgtctgatcttcgccattagtcgcgatgggctattgccacccgtttttgccaaagtcagttcaaaaacacatgtgccagttgcgaatacatggattttcgccatcgtcacaagcatcgtcgcaatggtagtgccacttgataagattgctgaattggtcaacattggcacgttattcgcctttgcaactgtttctctcggtgtgatcttcctgcgcaagttaccattttataatgaattgccacaagggtttaaagtgccactattcccatggattcctttactttcatgcggcttatgcttactactcatgacccagttacaactaacaacttggattgtcttcttaatctggttggtgattggcctaacaatttacttcagttacggctaccgtcacagtcgccaataaaaaataggcgttaagcagttttcataatctgcttaacgcctatttctatgcaatctatcgtgaactatctacaaaaatgcatgaacatccgtgaaaatgaggtcatgttgccagcaagaatcgcgacaattggcactaatgcccacaaccagtacttattattcttccgctgttcaacctcagctttcaaccgtaaattctcattttccatcttaaggcgtgcaatttcaagttctaatttatctttgtcatccatgcaactcaccttccgtcctaatttattaccgccattataacagaatttttcaaaaatctcccacctatccactccaacaaaaaaagcccctctaatcttgtggattagaggggctttaacgtgcttttcaaaccatacttctgcggctagctacgtcccgcaaacgatcgactccgtcgctcattcacgaaactaggctagtcctcaaagtataaccggcttgaacgcacttctatttttaacgtgcttttcaaaccatacttctgcggctagctacgtcccgcaaacgatcgacttcgtcgctcattcacgaaactaggctagtcctcaaagtataaccggcttgaacgcacttctatttttaacgtgctttcaaaagcatcctattccggttagctacacaagtcaaacgattgcttacagcaatcattcgccctgttaggctaatcctcacaggataaccacttttgacgcacttctattttttgtgtttcttgttcagaatcttgtcgaataagttgttgtcttgtggattaactgagtcaccacttgcgactgcaaatgcttttagcgcatcacgttgtttactgttgagggtctttggtgtcacgatgttaactgtaacgttttgatccccattacctgtcccgtggagcttaggcgcacccttaccacgtagacggaagacggtattcgtttgagtccccgctggcacttttagtttaacaggaccatggactgtgttgacttcaatttcatcccctagagcagcttggacaaagctaattgggacttctgaataaatttgtgcgccatcgcgcttgaattcagcacttggtgccacgcggaagacgatgaataaatcgccataagggccaccgtttgtgccggcttcaccttggccttgaagacgcatttgttgaccatcttcaacacctgctggcactttaaccttaacagtatgccgttcatcttcgtgacctgttccatgacatgtttcacacttgtctttaatttctttaccagtcccgccacagacatcacagacttcttgagccatcatgcggccgaaagctgtttgtcgttcaacttggacttgacctgcaccgtgacatttgtgacacgtttgggcgcttgttcctggtttagcaccagagccatgacacgtgtgacattctgattcacggttataagaaatcttggtttctttgccgaaaatggcttcatcgaacttcaaatccatccgatattgtaaatctgaaccttgacgaggagcgtttggttgttgccgagcaccgccgccaccgaagaatgaactaaagatatcttcgaaaccgccgaagccttcagcaccaccaaagccgccaccgaagccttggcctgcgccgccgccgaaaccaccgttcataccagcatgaccgtattggtcataagctgcccgtttttgtgggtcacttaatgcttcatacgcttctgtgacttccttgaacttggcttctgcatctggggctttgttaatatctggatggtacttctttgaaagtttacgataggcctttttaatctcatcatctgaggcgtctttacttatccctaagacgtcatagtaatctcttttatcagccattgtgggcctccattcatatacttacgcgttaaatctatcctatcaaggatagcataattgactgattaaaaaaagccaaggccctagaccatactaggttttggctttttttaaaacgcattattatttgtcgtctttaacttcttcgaagtcgccgtcaacagtaccatcgtcagacttaccgtcagttgcattaccttcagcaccagcagcttgttgtgcttcttgtgcttgttgatataacttaactgttaattcttgaacgatttcactcaacgcatcgcgttttgtcttcatgtcttcaaggttgttttcttgttgtgctttgactaattcttctttagcatctttagccttttgtaattcttcgtcagaaactttaccttcaagttctttcaaagtcttatctgtttggaagattaattgatcaacatcgttcttcaaatcaacttcttctttacgtttgttgtcggcttcttcattttcttgagcttctttcatcatgcgatcgatttcttcgtctgataaaccagagttactcttgatagtgattttttgttctttatttgtgccaaggtctttagcagaaacattaacaatcccgttcttatcaatatcgaatttaacttcgatttgtggcacaccacgaggtgcagcaggaatatctgttaattggaaacgacctaaagtcttgttatcagcagccattggacgttcaccttgtaagacatggatgtctacggcaggttggttgtcggcagctgttgagaatgtttgggctttgcttgtaggaattgttgtgttccggtcgattaacttcgtgaagacaccgcccattgtttcaatccctaatgataatggtgtcacatcaagtaaaacaacgtctttaacgtcacctgagataacgccaccttgaacagcagcaccaagagcaacagcttcgtcagggttgattgagtgatcaggttccttgcctgtccagttcttaacagcttcttgaacagcaggaattcgtgttgaaccaccgtttaagatgaccttgtcaatgtcgcctgattctagaccagcatctttcaaagcattcataacaggtgcttttgtccgatcaactaagtctgatgttaacttatcgaattcagcacgtgataaagtcatttccaaatgtaaaggaccgttttcgccggctgagataaatggcaagctgatttgggtgcttgtcacaccagataaatcttttttagctttttcagcagcatcttttagacgttgcatagccatcttgtcttttgacaagtcaataccgttgtctgatttgaagttttcaactaaccagttcatgatggcttcatcaaagtcatccccacctaaatgtgtatcaccgtttgttgataatacttggaagacaccgtcgcctaattcaagaacagaaacgtcgaaagtcccaccaccaaggtcataaactaagactttttcgtctgtttctgtcttgtccaaaccgtaagctaatgctgaagctgttggttcgttgataatccgtttaacatctaagccggcaatcttaccagcatctttagtggcttggcgttgtgaatcattgaagtaagcaggtactgtgataacagcttctgtgacttcttcaccaagataatcttcagcgaatttcttgatgtattgtaagatcattgctgaaacttcttgtggtgtatatgatttatcgccaacagttactttgtaacctgcttcgccgatgtgacgtttgattgatgcgattgtatcagggttagtgattgcttggcgttttgccacttcaccaacttggatttcgccgtttttaaatgacacaacagatggtgttgtccgtgcgccttctggatttgtgataatttttggttgtccgccttctaatacggcaacagctgagttggttgtccctaagtcaataccgattactttactcataaaaaataccctctttttttagatttttagtttaatttattgtgcaacaacgaccattgctggtcttaagacgcggtccttcaagtagtagcctttttggaagacttgtacaacagtatccgctttttgatcaccatcaacagcgaccgtttgcacggcctgatgaatggtcggatcaaaggcttgtccttgcgcctcaatttccttaacgccatgatcttctaaagcatgtttcatatgatcgtatgtcatttgaacaccctttttaagactctcagcactatcatcagttgcttcagttgccaacgcacgttctaaattatccaaaacgggtaagacatcttttgcaagtgattgcccatcatattttaacaagctagcttgttctttttgatgacgggtttgaatgtttttaatttcagcttgtgaccgtaagaaactatcttctaaatcatcatatttcttttggagttcagcaagttgagccgctaaatctggcttagctgcatcttcgtcaggtgcagcatcttcgatcacttcatctgcttctaattcaggttcaaatggcgtttcttctttaggtgtttctgtttctggcatttctgctactggcttttcttgtttctcagccttttcttgcttggtcaaacaaacacgctccttttaagattgatcatcatcgaaattcgcataataatcaattaatttcttcgctaactcttcacggaataaatcgagtaacccaatcatccgtgaatagggcatgctagtggggcccagtagtgcaatgactccctgtccgtgttcaccaacgtcataattaacagtcattagactataatgtttcaacagatcgttggccatctcggtgcccaggcgaacctgaacttggctattggcgcctccaggggacaaatctagcaacttggctaaatcatctgaacgattaatcatgttatacaacgacttcagctgggtgacatcggagaactctgaaaaattcaacaagttcatctgaccgccaacaaataagcgctcttgactcgcctttttcaaaacatcgtcgaagatgtctaaaaagccggtcggagaagccatgtactgggctaatagcgccggtacatccgtctttaacttctgactaaccacggttaacggtaagccaattaggtgatcattaatgattcgaatggctttttcgagttcatcacccgaaatcgcttgtggaatggtaaatacctgattatcaactgtccctgcactcgtcacgataatcgccatcacttggtgattactcaacggtactagacgaaaaccagttaaccgaatctcagccacttccggtcctaacgcgattgctgtatagctcgttaggttcgataagatattagccgattgtgagacgatttcatcaatcttatgatagtgctgtccaaatgattgttggaccgttgccacatcaaccggattgagggttgctggttgcatgagatggtctagatagtagcgatagccttgcatcgacggtacccgtccagatgacgaatgcgtcttctcaattaaaccgacactttccaaatcagccatatcattacgaattgttgcagaactaacgtgtaccggcaattctgccattaacttcttagaacccactggctgaccactctctgtaaaaagacgaataatttctttcaaaatcattaattgcctttcggtcagcatgtcatcacctctttttagcacttgaatatcatgagtgctaattacaattattaatatagcaagaacgtcaaataaagtcaagaaacgtaccggcttttttacggatttactgaaaatcggtccttagacggagggccttactggaccaaaggacaaaataaaaaacgagccgcttcttagatggaagagactcgctttatgaagtggaatatttataacgtgcttttcaaaccatattcctgtgcctagcgacacaaggcgaatgctcagaatatcccccggtttgaacgcactcaataactatctagcagaaactcttggaagacttcattgcctaagaacttacctgattcagttagtcttaaccaatcgccttcttgtttgaggtagccctttgcaatttgggtggcaactgtttcgccgtaaacattttgtaatggataattgaatttatcttgaaaatgactgatggatacgccttgcatcgtccgtaacccgaggaagagttcttcctccatttgttcggtcagtggcagaacatggcgttcaatgactggcaccttattttcttttaagggttctaggtattgttggattgggccgaagttatggtaacgatccttacctaaatagccgtaagcaccggcaccaaagccaaaatacttttcattgcgccagtaagttagattatgcgcagattgaaagcctggcttggcaaaattactgatttcatattgatctaagccagcccgcttgaaactatcaatcgcggcttgatacatatgtgcttcaacatcttgcgatggtaaatgcaacttgccttggcgcatcaagttatagaagattgttttgcgttcgagaatcaatgagtacgtcgaataatgcggtaagtcgagttcaattgccttattcaaactatccatgaaatccgcttcactttgttgtggtaagcggaaaatcaaatcgatactcatattttcgaagccgaccttgcgcgcgttatcgattgcccgataaacatccgcacttcggtgaatccgcccgatctgttttaaaatctgatcattaaacgactgcacgccaatacttaaccggttgacgccgttgtccttcagaacttgcaatttttcagtatcttgtaagtcattaggattggcttcaaacgtaaactcaccaccctcataaggtaagtattgatgaatcccatcgattaaacgttggagttgtgctggtgataaagtagttggtgtccccccaccgacatagatcgtatcaattggttcgtctgggtattctgccatcactaattgaaactcgcgaatcaacatatcgacataatcatcgaccggttgaccttcaatgaaaaccttattgaaatcgcagtagtaacaaatatgctcgcaaaatgggatgtgaatataagcgcctgccattaatgttgtgcctctaatttctcaaaataagttcgggtatcggcttcgtcttggtggagttggtcaatcaaggcttccgcggagtcaaacttcacttcgtcgcgcaagtagtgataccaatccactttcacttgttcaccgtaaatatcgccattgaaatctaataagttaatctccaccgttaccgggttattgctgtggaacgtcacattccgaccaattgaagccatgccaatataccattgaccgcgcactaaaaagcggaccgcataaatcccaattcctggtaatcgttctggtcgttgcgattcgatgttagcagttggaaaccctaattctcgcccgcgtgcttcaccatgcactacttcaccggtcgtttggtaaacataaccgagtaattcattagcttccgcaatcttaccagcatctaaatcctctcgtactaatgtcgagccgattttgacaccattatggtcatgttctgcaactgtcacaatggcaaagcgccctttggcatagtctgacaatgtcgtcatattcgcaatctcttttttaccataagtgtaatcaaagccagccaccactgtatccgcatgtaaagcgactaagtattgatcgacaaatgtttgtggggctagttgtgcaaatgcttcattaaagtgcacgatgtagaaaacatcaacgcctaactccgccatcaattcttgcttgcgctcaaccgttgataaataacggaatgactcccgatcggcattgcgataaacaatggcaggatggatatcaaacgtcatcacagctaatggtaaacctttttgaactgcaatttgttttgctttccgaattacagcttgatgacctcgatgtacgccatcaaaaaagccaagcgccaagaccacttggtcagctggcacttgttcttttgaatatggatgaattaattcaatgacacgcatatttttcacctagttttttttaatgagtcccttgattttgtaaatacattttataagggcgataaagatgttgcgctgctttttcaacttgatagagcgccttgatatgcccttgataggtcaacgccacaatctcatcggtttgttctggcaatgtcaagaacacaccgtttaaaagcttggcccattgatcgtcgtctaaagcaatcttcttgtaatcttcaaatacatggtcaattggcaataaaacgtctgccagttcgcccgcttcagctttttgcgccaattgttccaacgtgatacagttaccaatttgaatgccgccactcttaagacgtgtcaaatctgacatcactgcgggtaaaccaagtttacgaccgaaatcaacagctaatgtgcggatataagtcccctttgagcaaccgacaatgaaccggaatgtttggcgcccagattctgcgtcaaattgtggttcaccatccaaatcaaactgcgtaatcgtgattgaacgttgtggccgttcgactggatcaccagcgcgcgcatagtcgtataaacgccgcccattgactttcaccgctgaaaacatggggggaatctgaattgaatcgcccagaaaactagcgagggtctctttgattttctcagttgaaaaaggttctgttaagcgcgcctcttcaacgacttcaccatctaagtcttcagtcgttgttgataagccaagggtgatttcacccgtgtagactttaccagaatgcaccaattgatcaacaaccttcgttgcttgaccgatacagattggtaacaccccatcgacgttgggatccaacgtgccagaatggcccactttcttcatgtgtaaaatgcggcgcactttaaacacacaatcgttactcgtcatgccgcgttctttatataagggtacaatgccgtccataagtaatctcctttaagtattaactaaactattatagcatagagtgtgaagtcgaacgggattagctttatgatgctgctcaatttattatcaaagcacaaaaaaagatgggacaaaagaaactcttgcccatcctcgctcaatgttgttttatgtaactttgtgtgcaccgaagaaaatggtacccccgtccttcctaactcgattaaatataaggcgcaattagtccaagacaaattgcataagaattttaatttccattcactacgtcacactcacgctactatgctgctagaagccggagaaaaaatgaaagtcgttagtgaacgtttaggccattctcgaatcagcacgacaatggacacttattctcatgtcactcataaaatgcgcaaaaatacagttagtctgatcgaacaaattcagaacgagtaatgttggcaagagcactatcttgaataattcgaaacacaaaaaaatagcagttttgccaaccaacgaaaattgacgttggcaaaatgttggcaaaactgctattttatcactattaaatttttaagaatccttatttaccggctttatcttcatcattcatcttcaaaatggacatgaacgcctcttgtgggacttccaccgaacccacggatttcatccgtttcttaccggctttttgtttttctaacaacttacgcttccgggtaatatccccaccataacacttggcgagcacgtttttccggtaggccttgactgttgaacgggcaatcactttattcccgatagctgcttgaatcggcacttcgaattgttgacgtggaatggtttctttcaacttaccaacaatcgctttgcctcgttcaaaggcaaagtcacggtgcacgataaaactcaaggcatcaacggattcaccgttcaatagaatatccatcttcaccagatcactcgcacgatagccagtcacttcataatcgaatgaggcataacccttggtattggacttcaagtcatcgaagaaatcgaaaatgatttcagacagtggcatgttgtagatgacattaacccgataggtatctaagtaatccatcgtgacgaattcgccgcgtttacgttgtgcaagttccatcacagcccccacataatcgttcggtaccatgatagatgctttaacgtacggttctttaacttctgaaatatttgatgtttctggcatttctgttgggttatcaatcacttcttctgtgccgtcggttaaatcgacatgataatccactgatggtgcggtcatgatcaggtcaagattgaattcccgttcaagccgttcttgtacgacatccatatgcaagaggcctaagaagccacaacggaacccaaagcccaatgcttgtgacgattcaggttcgaattccaacgcggcatcatttaattgtaatttttcaagggcttcacgcaagtcgttaaacttcgcgttatccacgggatacatcccagaataaaccattggttgaatatgccgataaccatcaagggcttctgctgccggattgtcagcaagggtgaccgtatccccaacccgcgtatcttgaatggtcttgatgctggccgtaatataacccacatcaccaaccattaagaagtcgcgtttaacggctttaggcgacatcacaccgacttcagtgacttcgaattctttcccgttattcatcaagcgaatcttatcgccgactttaacagtgccatcaaaaacccgcacgtttaacacaacaccccgataactatcgtagatcgaatcaaaaatcagcgccttcaatggtgcttttaaatcacccgttggtgctggcacgtccgttaccagtttttctaggatttcttcaatcccaatcccgctcttagcactagcaagcacggcttctgaagcatccaaaccaatcatctcttcgatttctgctttaacaacgtctggttgtgcagatggtaaatcgattttattaatgacagggacgatttctaaatcatcgtcgaccgctaaataaacgttggctaacgtttgtgcttcaaccccttgggccgcatcgacgactaataaggcgccttcgcaagctgccaaacttcgtgacacttcgtatgaaaaatcgacgtgtccaggtgtatcgattaaatggaaaatataagtttcgccatctttggcatggtagtgtaattccaccgcgtttaacttgatggtaatcccacgttcacgttctaattccatgtcatctaagacttgcgcttgcatatcgcgcttggcaatagtatccgtcatctcgagaatccgatcagctaatgttgatttaccatgatcaatatgcgcgatgatcgaaaaattacgaatgtgcttttgccggtctaacattcctgcgtaatccattaattgtacctacttcctctgactatcctttaaattataccaagcctgcctcgtaaaagcgaacgcatttaacggctttccaataaaaaagccaaaaccaaacggatgattttgacctttacttcattactaagtcctattttttgtcagctttttgcgccttttctttcttatctttattaggtgtcacttcactgacaaccttcttaactgtgccttcaattacatttttcaaactatctaatcgttcttcgtttgccatatcaatgacttcctttctattttgttcaccttcattctactttttaaccacaatgactgtcaaaaggttcgccttttattatctaaatgctataatttaggcaggcaaccaaatagattgttgcttaattaattgattggagttgacccatatgcaatttatcatgactttttcaaataacgaaaccgttactttttcggaaatggatttgctacatgcttggaagaatgatactacctatttaaacgttggtgatgatcaagccttttatctagatgaaatcttcaatggtagctaccaagacgccattgcaacttctagcgaacaacaactcgctaaagaacgcccaattcttgcattggctggtctattcgctgatgcagattggttaacttttgaaaccaatcctgaaaaatactatcaaacaaaagcaattgtttcactcacaaccaaagattaaccgctaaaagcctaggtacgcctaggctttttataattgctttcatattatgtacaatatacaatcgttaagaactgttattcattactttggaggttattatgtcctatttatttttagcgttcttggggagcgcactgatttcactactattctttaaccggcaacgacccagaaaatggcgtcgcgtactgattatcatcatcgccttaatcggcttaggcggttcattaatgccggtggctgctgcgaattccaagaagaccagccaacatcaagttgatgtacgcgaaaacaaggcggcccgtgctaactcgagcgctttaaaaaaacaactagctacaaagaaaacagaggctagccaactgacaaaacaagttgccagtcaatcacgacttgttaaaaagcagcaaaaagcgtctgagtcagaaagagtccgtgcggcttcagcctcaatcgccgctactagtcaagctagcgaggccgctcagcaacaggctgcaattcaggcaagccaacaagcacaacaagctgctagtgctcaacaagttgaacaaatggtgacaattgcccctaattctggtaaaaaataccatcttgatcccaattgccgtggcttaagtcgtgccaacagtactacaaccatgccattgtcacaagcacaagcagaaggctataccctttgcggatgggaggattagccaatgaaagcaacccgtttgataagtcgcgtggtggtaacaatttcacttgctggtgtcggaacccttttgcaacaaccaactaccgttcacgctaccaccttacgtcaagaaaccaagcgcattaatgcgcacaacaaaaaaaccgaacgtcaaattaatgcgcttcaacgtaaaattaaccagttaaacaaaaaactcactaactatcagcaacaaatgcaaacgactagtcttgagcgtcataacacatcagagctcgcggccctcacctaccgtggtgaaaacgaggtactcgtcaataataaccaaccaagcttcagtgctactgatttggctaccgatcacggtggttggcaaacctttagtaatctcgacgcactaaatcgcgttggtgctgcaaatgttcttttaaatcaatcgatgatgcctactgccaagcgcgaaggactcacttggaatccgaccggttggcataataagcggattaaatctggctggctgtataatcggagtcatttaattggctatcaactaaccggtgaaaataataatccaaagaatctgatgacaggaacacgccagctaaacgcacccgaaatgctggcccatgaatcagatattgcttattatctcaaaaaacaccctaatcgttttgttcgttaccgtgtcacacctatttttaacgataatgagctgctagcccgcggcgttcaaatggaaggccaatccgtcggggataacagcattcaatttaacacttacatttttaacgtccaagacggcgttacattaaattacgcagatggcacaagccaaattgctaaataagctcagaaccacgataaattccttttatcgtggtttttgctatctaacattattgtcactagccatttaaaacttaataatatgagctaaacatacgataatgtacttacttaacttttagggaggctattatgcagactaaatcatatcaagttttaaataacttcgacatcaacgtaattggaattatcctcatgtttattgatcacgtgcaccaaatgttcgccggggctggggtccctggctgggttgattggttcggacgaccagttgccaccatcttcttctttatggcagttgaaggattcatacatacgcggaatcaaaaacgttacatgttccaattactcgttggtttttggattatgaacttgggaagccccattgtccaacacttcttcgaagtcggtaacctcgcactgtcaaacaatatttttaccgatttatacattgccgttttagcaatgtatgggattcaagaaattagtgtcggtcgccgcacgcaccattccaaacaaattttgcttggtggactggcaattattgctcctatcctcttatcattattggcgcttggtctaattgctaaccctaagacaatgatgtttgctgccaatctcgcaatggttattccaaccattatgcttgcggaaaatggccttctcctctacataggagtatttttttatcttttccgaaacaaccggctcttacaatgtcttaccgttcttgttttcgcattccttgacgctggaatcaactccggatttgccttcactggactcttcactagcaatacgcaatggatgatgatcttcgcgattatcccaatcctcttgtacaacggacaaaaaggacgtagcatgaagtatttcttctacttgttctacccaattcacatttggttattattcattcttgcttcattaatgggcgttggcgaataaattattgattctctatgtaagctaaaaactgtaaaaaactcgtttaagtatgtcataatatctttggtaggaagttattaaatttatcataacttttcatctcgtccagaactgacgacgcgaaaagctgataaggagaagggggttttacatcatggttaaatcatatcaaagtttttggtcccggatttttgatttctcaggcacttcaaaccgacctgatttctggtggccaatcatcattaactacattctaggtggtattatcatcggtattattcaaacaataaccggccatccaatttcagaaatctataatattggggatttaggcatctcaatgggtcgtaacatcgtcgtcttcattgtttggattgcaactttatccgttaaaatgcgccgacttcacgatacagaccgctcaggctggtgggtactcattgaattcataccgcttatcgggacaatttggttctatatcctaatgctcttaccaacaaaaacaaaccgttgggcataagcaattaatgtaacagtcacacgtgtggctgttatttttttgcaaacaaaaaaggcgattaacaccgttacggtagtgttaatcgccttttgttaagcgcctaattctgcttaacaccttgttatctaatggagccggcgggggttgaacccgcgtccatgcgcattgccacgtcaatctctacactcatagtcgaacgatttaggagttcgctagtccaaaacgccgtccgacagaagctcggatgaactagctagtttgcaaatctcttttaaacacctcaaacggcagcgtttaacgtaacccaattaatttgagacccggatctaacccttgggtgaagtcaggcggatcacgctatgctggtgtttaggcagctacagcgtaagaattgttattgtttgcagttataattaactgtaacgttgttaacgtagacgtaacctacgaagtgcaactcacgctcacctacacatgtcgaatccgtaacggccccgatatgcaaatactagtttagcatatcagccagtaatatgaaagactttaaccctatttcacccctaagcgtttcttaggaaaccggtcttttaaaaaggtttgtaatttttctaccgtcgttttaaagcgcaacttggcaatccgaatttcaccgacataaaaacaagcttcgactaagtcaccttgtgttagtaattcaatcttagaaatcgctgcaaattgatgaatagtatttaagtttgcaatcaaacttgttttggttaaaccacgaggccaaaaagcaatcacaattaaaattacaacagagccgatacctgtgatttgatcgctgagcgttctgcccatcactaacgttaaacctagtaagaggattccagcacaacataaaaaaatcgtccatagtcgattccgttttgcgcgccaaaccattttcgtttcaacaatcagccagataatgagcaaggcaattgccaataagccataaaataatgtaaaacctgtcatattcccattccctccactaaaaaatgaccagccatgcgctggtcattttcactgatgccttagacgtggccaatttcaacaacgtctctggcaatcattacttcttcattagttggtactaataatactttaacgcgagaatcgtcagcgctgatgacgcgttcttgagccatcacgttattgcgttctggatcaactttaacgccaaagaaactcaagcgatcggcgatgcgttggcgcattaagatgtcaccttcacccattccggctgtaatcactaggacatcaagaccacccataatggcaacgtatgaaccaacatacttgattaaacgattgacgaagatatcaattgccaattgtgattctggacgttcttcacgcgttttttcaagatcgcgcatatcaggagataatccagaaatcccataaatacctgatttagtattcaaaatatcgatcatttctgctggatctttaatgtttaatttttccattaaaaatgcaacgagtgatgcgtcaatgtcccctgaacgcgtactcattgtcacccctgcaagtggtgtaaagcccatggatgtatccaacgatttaccgtctttaatagcagtcactgaaacaccactaccaagatgcatggtaatcatctttaattcttccaatggtttgcctaacatttcagcagcacggtgggaaacataccgatgactagtcccgtgggcaccgtattttcgtgctccatacttgtgataatattccaacggcaaactgtaaagataattttcttcaggcatcgttgtatggaaagatgtatcaaaaacagcaacctgtggtacatcatgtaaaatcttgcggaaagcacggataacacctgcttcagcaggattgtgtaatggtgcgtattctgacaattcttcaatccgttttaatgacgcttcatcaattaatgcggatgacttaaagtcttccccaccggcaacgacccgatgaccaatcccactaatttcactatattcattgatgattttaaattcgattaacttcttcaataacaaatcaaccgcaacatcttgcgtcttaatatcctgggtcattgagaatttttgaccatccccgtatttaacggtaaagactgaatcggataatcctaaacgatcaaccatcccttgtgcgacaacttgttcttcaggcatgataaataacttccatttaagggtagaactaccagcgttaattgctaatacttttgacatctaatcaccttttctattcgattattgtaaattatctttatgccaagtccggatcttctgtagatacgttgcaaacgccttttgatcgttagaatttggaaattcacctaataaaatttggtccacttgtttagccccggcaccttgtttttgaaggactaaaattgctttttgaccttccttagtcttaaacaagtttgctggtaaactcaataagccttgcaaatagacatgttttgtcacccatttaatcagttgcttagcttcatccgtttccaaaatcacatttggtactaggaaaaagccatagccgccttctttcacataatgcatcgtttgttcaatcaacaagtgatgtgcatatgaatgaccactggcagcgtgggtttcaaaatcagccgcccgttcatctaatggataaaaaccaattggtagatccgcaacggcgatatcaactggtttaaccagtagcggttcaatcgcatcctgatggaaaaaggttgttgaatgcttctgcaattcactactgatgcccgcaatttccaacaaactatcatcattatcaaccccaaaaccttgcacggtattccccgttagtttttggatatgattgattacggttgccaataagttccccgttccaacaactgggtccaaaattgtcttgatttggtcagcaccaccaaaaacctctgccaaataagctacaagatagccgatcgcatctggtgtcatttgcttgtttggttccactttaacttgacgcaaacccttgagcgttgccaactgtaatgcttggcgaatttcttctgcttcaaattggttgagattaaccgccgcataaagcggttctagttgtgcaacagtggcagcatctggtaagccgtcttcaacctttacgcggccaccatctgcaatattagcaatggtctcggtgagtgcatccaaataggttgtttctaaattcttttcaattaattgtgttgtttgatcgagttgatcaaacaacgtttctacagcactcttaggcaaaatagccacctctattcattagattcctgttatattctatcggtattctaacggcaaagcaagtaatacaggtgggtatacctagaattataaatcatagtaagcgctttatcaaatagaaaatttatccttgatctgtttcattctgatctggaaactgttttcgataaccattgtttaactcaatgatgattaacttgtgttgctggtcgatacgactcttaccgatgttagtctttataccttgaattgactgagtttgccgcgctttatttgttaatttaagcaagatttgcgtttggtaatagttagtcaaactgacgtaactctgttgttgctgttggtaactgtgggtcacaatcaacaacgcacttgtcaccaagctcaacatcaaaactgcattcaagagcgcgactgcagagcgtttaatctgtatttttcgtgtcatgttgcgcctccaaaaaacattcatgttgataggctgtcccatcgcttaagcgcgcttcgagttctaaaaaaggttcatgatacaccatttttaaccgcgagaccccatcaaacagaggcatataaccattcttcgtactcgaaaccaccagttccttcttagttttcgttaaggtatagcgtcgtttcgaatctttagcgacggttaattgctgttcataattcgcctgttcaattgaaataaattgagcgtcatccagaaaacgatcaagttcaatcatactaatgtgccaattaatattctgacgttccatctgggttaattgcgttgtgtgcgttagtgttttagtggttgccaatattaattgactgctcaatatcagaataacgagagctacaaccatttcaatcagtgtaaatccagagcgtttagtaacaataccattgaagtgcaactcgctcacccgctttatttgtgacataaatggcctgttttttggtgacgacttggtatgtttcccgttgcaactgccattgtgctcgtggcggctgctcatttgccaatcgattggcagccattgccattacagcatattctgtagcagcacaccgccgttgaacttgatgtgctttaaactgccgtagactcattgtcaaggtcaagcctcccatcaggagaagacttaacgccacgatttgttctattaatagaaatgccggtctacttcttaacatgtaacatcccccacatcatctggacccgatattcataacggtgcccatcaattttagaccgacaaatcaatgaccgcggtctagcagctgagtcatgattaaattggatcctaaaccatgtttctggatcgacgcacatcaatgtttctggaatcgggatatccatactttggtattgtggatccgcacttgtgtaatgcaacgtgtggttggtttgatcccaagataagtgcacattatgcggctcaacagcgacatattcgcgagtcgcatgccaagacgcttcaaattgttcaaaaaataaacgctccgcctgccgtgcacgataatctcgaatatgttgcaacgcaaataaactgactactccaacaatgaacaaaacaagacagctctcgattaaagtgaacgccttattttgtattttgaacaactttattgtccttaattgttatgccgcgtttttcagcttgtttaacctgattattggttaaatatttttcacctgatgctaaatcggctagactcgacaccgttttaccgtcatcctcagctaattcaacttgtgtttgaatcgttgccactagagccgtatccgttttttgctcagctgtctctttctgatgcattaaattaggtgcaattaacaagactaacattgctatcacagctagcacaacgaccatttcgatcaatgtaaatgcatttcttttcttcttcatgaaattccctccattgtatgatatagcggtaataaaatactgagataggtacaaataatgatgatcccaattaggataaacaagagcggttgtagccaattcaccttctgtttcaattgccgttgcagttcatcgtatttaatgactgcaagcagatcaacctccttggccatctgttgtaacggacttcccttagcgagcactaattgcagctcaggtggataaaaaacgccatccgctaagttcgctaatagcgtgccccccttttggacagccgtttcaagttgttgcattaattgtacaagccacgatgttttcgccaaacgatgtgtaagctgatgcatttcggccaagtttaagccgttattcaggcaagtcgctaaatcaaataataagcaatactgatagtaagcctgcaacgttttaccgatgaagggccatctaaatgccgccgccaatcgttgtaatagcggtcgccgatgccaacggaataaatacacactaatcagaccaccagccataataacgaatgtccccatcactctaaaaaatagttgtaatggtgatgtcgccgaagttgttgggttaaactgcgcgatttccggaaaaagataaatctgcatcatcccaatcaacgccccgagaaaaaggagtagaaaacagggataggcaattacgccaactaactctctacgccgtttctgttgaattcgctgtaattggccaagatgtaacaaacactcgcctaagtttccctgcaactcagtcaattcaatctgtgcaacaaggtgtgttggaaacgaaaccgccgctaagcttggtgctagtcgttttcctgcttctaacccagtttgcacctgatgcagccactgcttttgtgtcggaaaaacaatcggcatgaactcaagtgcttgttgtaaagaaaaaccattttgcagtaagcgccctaacagcaacataaattcagtattgaattgaacagtggttttagtcttcatgaacagcctcctccaactgttgtgcagttgctaactcatagtgggccgctacattgtggccttcgaccactagtgattgataggcaacacccgctaaacaagcggttaattgtgagtggctaattccaagatctaatagacggtccatcacccccgttgtacttcgcgcgtgaatcgtacttagtaccaagtgaccgctcaacgccgcagaaaccgcgtgttgggccgtctgtaagtcgcgaatctcaccaataattaaggtatcaggccgtaatcgcaaactgattttcaacaatgctgcataggttaaccctgcggcttcattcacctgtaactgtaagaaagctggctgttgaatctctatcggatcttcaatcgcaaccaccatcttatcttgcatgacttgttccgcaagatagtacaaacttgttgtcttccctgaaccagttggaccggcaaatagcaataatcctggttgctgaattaactgcattaaacgacttaaaatctgcgagtcgtcgcaatgataagtctgcccaatgggataaatgaaacgaacaactaaactttcccgattcaaaaaatcccccacggttgccaaccgtaaataaatcaattcgcctgccacctcgatcgctgaacggccggtctgtggacgccgagtttcactgatatccatccccccttgatacttcatttgattgagccattgattgccttctgacagagtaactttttgtaacggctttagtcctgtcgctaagcgttcaataattgcccaacccgtcgatagtggtcgaaaataaagatcctgcgctttttccgttgcgcacttttgcaaaagggttgttaatacttcggtcatctcgtccctccttcctgactaaccaaagatacgcaaataaccggataattttctgcacaaaaaaagtgcgttgcaattacttgcaacgcacttatcaaacaaattagtcttcttctggtagttcgccagctgtataaacttcttgaacatcatcgttgtcttccaaagcatcaattaaacgttggaattgttctgctttttcaggatcaaccggtgttgtattttgtggaatcattgttaattcagcatttgccaatgtgtatttcttttcaagaatatcacggacatttgctaattccttaggatctgtgtaaatttcaaacacgtcttcttcagtttgtaaatcatccgcgccagcttctagaatgtcttcaaacatttgatcttcatcaacatctaagccttcacgtgcaatcgcaatgtaaccacgacgatcaaacatgtaagcaactgagccagaagcacccattgtcccgccattacgagtaaatgcaacacgaacgtctgaacttgtccggttcttattgtcagttaaagcgtgcactaaaacggcaacaccacctggtgcatagccttcataagtaatttcatcgtagttcgcgccatcgctaccgtcagctttatcaattgcccgtttgatattatctttaggcatgttagctgaacgtgctttatccataattaaacgtaatgcggcgttagaacttgggtcaggaccgccacttctcgcagccatgaaaagctcacgggatagtttttggaaaatcttgccgcgttttgcatcttgtgcgtttttacgaccctgaatattatgccattttgaatgtcctgacatatctaactcctcttttcgattatagaattctggtactaagtcgttttctatgatagcaaattaccatgctaaaagcaatgatagtcgggctatcgtctctttttttgtgtaaaaatccactgtagtgcgcaaacaatcacaatccccgttaatgcgccaacactgtccaacatcacatcttgaaaaagtggcgtccgatcaccagtcaacatttggtgaaattcgtccgtggccgcatacccggttgctgccagccaactaaagataactgctaaaaaaccaccggttacgcgtggccgtagccctaaataactaaaagccgccaataagaaatacgtcccaaaatgggcgccttttcgcacgaaaaactccacaaatttgaaatacccagatgcttttacactctgttcactgcctgcataatggaacgaaaattgacttaaccaagccttaagtggttcattcttgagaaatcgttccaaagtgggcaccgatgtttgttcatgatacgtcattgaagaactgtaaaataagatcgccatcatcaccagtgcagccactaagaaccaatcacttttacgtttaaacattgctgacctccgaaaaactagtatttctctattataccaaagcacacggttgtgacgagcactattattcgttatactactctgaagaaagagggaaattctatgtctgatcaagatcgcttttaccaaccacaaaacgctaaagatgcaatgcgttttgttcaaaaacttttcaatcaatataaccaagcgccactcacagaagaactaattgcctatcatcaaaaattattggcttatctcactaacgatgttacaaccgaagtccaaaaacaagcaaattctgaacaagccgaaaaactgactggaatgattgaagccatgcaagattggttgaagattcgcctcagtggccaaccctatgccgggaaaatgcaacacttcaagttcgttcctgatagccaacaagcccacttcaaaacccgcacgattaaaggtggcaaaaaagcaaataacctcagaacatctgcccgtcactaattcgccttgctattttagctaaaagtgctaaaatatttttgtaagcgtttgggcccgtagctcagttgggagagcgcctgcttcgcatgtaggaggtcgccagttcgaatctggtcgggtccatcaatattaaataaaaccaccctattatttattagggtggttttttcgttcaattatttaattaatcgtatttaaaacgtctgtcagcgcttcacgggttaaaggattaggaaaactgtcctgcttcatttctaataataaccatgtacctaactgtagaaattgttcttcaggcattgcgtattgtaattttaataatcgttgggcggcccctctagtatcgttggtagcaattaaacttgccaattccctttgaaaaggcaattttttagcattttcttgtggaaagacaacctccgactgtgaattaccactttgtttcgataacaaataacccattccttccgcaaaagaatcaacttgtcgcatcaaccagtcttttttattgtccattttcatcccccccaattatgattattttaacaaattattatttgaagaacagtatttaaggtcacgaataattctctaattcgctagcctcaacattattcattttcaaagtgcacaacttaatcgttgccaacttctgcatctagcgctatattattggtaacccattcacaattcgaaggagatttttaatcatgacagataaagtctttacaaaagaaacactcgctcaatataacggtcaagatggtcaacccgcatacgttgccgttgatggcgtcgtttatgacctttccgcaatcgccccttggcaaggcggcaaacattttaaaggtttaacagccggacgtgatttaagcgaatttttcgccaagtcacatcacacaccagccactttaaaacaagccgttcaagtcggcacttaccaagcttaataacaaaaaaatctgccatcaacaaaattgttgatggcagattttttaataattcaatattcctagaaacatcctagctgctgacacgccctagaataatagtgtaattaataaaatcgcgaggactacctgtacggtcactaatccgccggcatatgctaataaacgtttaccttggctgaagagtgcctttaagttcaagcgtaacccaatggctgctaacgccgttgtttcacaccatgtactcaagaaatggcacagtgtaccaaattggcttggaaaaacccgtaagctatttaagacgcagaataataggaagccaatcacgtaccatggcactaagctactcttcttcgctaataattgttcgctcagttttgtatcactgactttactttgtttcttttgatgtaagtaaccaaaaccgctgacaacaaaaaccaaacagataatccgtaaaattttgaataaggtcgctgtgacaaccgttccttggttaatcatcgtcgcactggcaaccacttgaccaactgactgcactgttccaccaattaacacgccacggagttcattattatgtccccacatcaacgttccaataactggcaagagtaacatcaagatggtccccattagatttaccaatgtaatcgcaatgccggtatcttcgttatcggcatcgatgacgggcgcaattgccccaatcgcactcgagccacaaacggcattcccaccggccatcaataaataggtaccttcgctaaattgcaaccggcggccaaaccagatggcaaatccaatcgtacaactcatttgtaacacggtaaacagcacaccatgccagccgatttgttgaatactttggaatgtaattgtcgcacccagtaacatgactgaatattccaataattttttctcggaaaacttagttccggctgctaataccggttgttgcaaccaagtattgccaagtacgatgccgacaaaaagcgcaatcgttgcgccgcctaacattggtaaccataatttagcgatgtaataactggcaatcgcaatcgctaacgataacgcaaagccaggtattttttttgttatattgtccattgctttactccttctcacttgttatcttaaactataccgaaactctttcaattaataaaataaatctttataatagttgttattaagataacgaatagaagtgatgatatgtttaaaattttaacaacttttaaaaccgtttatgaaaccaagaattttacaacggctgcgcaactgctttttctatcgcagccgaccgtttctgtgcaaattaaacaattggaagatgcgctgggggtcacactatttgaacgcaatgggcgccagcagatgacgccgactaagagtgctgatctcttctaccaacaagcacaacaacttcttgatttatgggaccaagatttgcacgcactccatcatcaagatggccagccaaaaacaccgtgccgaattggcgcctcgcacaccactgcaacctacttattgccaaccctgcttaaagcgcatcggccagcccttgaaacactcgccttagatatcagtacactcaactcatcgcagattgttcaagaattgacgcagcacaaactagactttggtttcattgaaaaaccattaaccgaaaaagacttgattcggacgccactacagaccgatcaactggtcctagcaggtcgcccgaatgaaccttggttacttcgtgaacagggttctggcgtctatcactacacgatgaattacgtcaaagaaaataatttaccactcgaaaacgtgatgaccatcaaaagcaatgcgatgattatccaactattaagacagggtatcggccaatcattagtttctagcgcagccttacttgattacccagaaattccctatcgaccattgtcccaacaatatcaacgccaattctaccttgtcgcccggaagaatttgccagcaccaattcaatcatttattgcgttattaatggcgaccccactaccaattgaataggagtgttattttggaaaactcaccacatatcaaaaaagaattaacgggctacatcatccgtgacgttttcagctcgttaggcttatccatctatattttagcggacacatattttatcgcttacgcagtcggaccaattggcttggccgctttgaatattgatctgcccatttttaacttatttaacggtttaggtctgatgctcgggattgggggcgccacgattttctcaattaacaagagcaagcatcccgaaaagagtcgctcgattttcactcaagttctttcttttgggattttattaggcctcatcatcatggcgctcggcttaatttttattcacccactactccacttactgggtgccaatcatgaaacgctcgccccaagcttgacctatttacgaattattttaattggcagtcccttatttatcatcaataacttagtcttaagtttcgtacgtaacgatagtaatccacatttgacaatgattgcgacactttcacaaagcttattcgtcattatcttcgattacctcttaatgttccccctacacatgggcatgatgggtgctgcgatggctacgatttgttcgccaatcgtcagcctactcattttgacacaacaccggcatcacccacaacggttactaactttgcagcacttaaccttacgttttaaaccgacgttcaaagcaattcaactcggtttcccatctttcttaactgaaatgagtactggggtcagcattttcgtctttaacattgttattctccatctcagtaataactatgccatcgccgcttacggcattatcgccaacatcttactagttggtctatccctattcaacggtgttgcagtcggggttcagccaatcgttagtcgcgaatttgggaaacatcattgggataatgtcaaaacgagtctcaaaatcggtttgctttccgcactcgggattgcggtaggattatatctcgttttgattggtcttaaattaccgatcatcgaaatttttaaccatgaacacaaccaacaactgattcgctacgcgtctgctggcattcccttgattttcattagttttttcttctcaagcatgaacatcgtcaataacttattcatgaccgccattgcgcaacctcgattgtcatttttcgtggccatcatgcggggctacatcgttttgattgcgagcgtcttggttctttctagccttttcggattaaccggtgtttgggtgagtgtcccattaacagaaattttaatcttcatcattggaatgctcatcacgcggaatctcttgaaaacaatcgatcaatagtattaaaaaggtgtgtcacagctcaacttgctgcgacacacctttttttatttaaacatcaattgttgaatcagtgaaatgacggttggattatccggcaattcagtatgggctgcatggtgctggctcaccgaaattgtcatataatcagcaacttgcttttgaaaaatgagccgaccagccgcaacactcgctgctgggacaatcccatcattcttatcgttaattgtgccgccgactgaatagaccactaagtctttggataaatgttgccggcggctctttaaatcagctaacatcggtgtttcctgagtgatgtgctccgacatgccattatatggcgttcccaacgtcagtaatcgcgtaatcttcggtccacttccactacgctcagcataccgcgttaatacaagcccaccgttggaataaccaaccccaccaaaatgcgtaaagtggtattgtttagctaatttacctgctgccaatttaaaccattcggattgtttaaagacgttctcattaccatctgcattgttttcaaacgcaaccacaatcacggggtgttgtattttttgatcaaagcgaccactggttttcaagtgaccattttttaataccgttacttttaaaacatggcgtgtggcttgacggttcaatttagcaaaggtgccattaaacccttcaactgttccattactccccggtacgaaaataacgggctggtttgcggtggccgaagttggctgaataatcgatggcaccgttgttggaccagtcgctacatgaccgataaccccaccaatgccgaaacacaagatacaaattagtaaccattgccattttttcatttgtcatcttcctttgaatcaatcaattggtaatcgttctgtaggtagaatcgcttggatatcggctgcaatcggtgctgtaatcgagattgattgttgactgaatggatcttgaaattgcagtcgatacgcgtgcaatgcttgtcgcgttatccctaaatcaagcggcccatcatagagctgatcacccaccaatggatagcctaacgcgctgaagtgaacccgaatctgatgcgtccgcccagtatgaatctgaactttaaccgccgtcaactgacccgatgcacccaagcgccaataactcgtccaagctgactgaccatccgccaacacctcacgccgcggttgatggtcgatttgtccaatcggttcacgaatatcccctgatgctggtaaacccgttcctgaaacaactgctaaatagaatttttgtaattgatgctgttcaatctgcggttgcaatagactttgtgcaatttggtgtttgccgactaaaacaattccacttgtatcaaaatccaagcgcgtaatgatatgcggtactaaatctgttgcaccctgcgcttgccagtaacccttaatgcgattcaacaaagtatccgtttgattagtgggacccggaatcgttgccaagccagctggtttattgaccgccaaccaatactcgttctcataacaaatagtgattggttcgtgactaacagcaactgattcatcggccagttcagctggtaactgcaatgtgaccacatcgccgcattgtacctgatcactaggcgcacttttttgcccgtttactagaatcggttggcctaacgccttaattttggcgtacaatcgttgactgatgccacttgctagcaagaattgtttaacagattgtggttgattgacgtgccatttaatttccattattcatttcccatctttgttctacttactgctattatacgatttatagcttgccaatgccaatcaatggccgaccatattgtttgctaaaagcttcaccaattcgctatgcttaaattagtaagtaaaagtggttgccttttcaggggaacgtgctatactaaagttacttactaataataagtaaaacaattggaggtttcactatgacaaaaaatatcgcagttttaattggtagtttacggaaagattcatttagcaaatcagttgctaaatcattgatgccattattcccatcagattataatctagaaattgttgaaattggtgacttaccattgtacaaccaagattatgatgatttagatcaagtaccagaagcttacacaactttcagaaataaaatgaagacaatggacgccgttttattcgtcacaccagaatacaaccgttcagtaccagccgtattgaaaaatgctttagacgttggttcacgtccttatggtgcaagcatctgggataacaaaccagctgaaatcgtcagcgtttcacctggtgcaatcagtggtttcggtgctaaccaccacttacgtcaatcacttgttttcttgaacatgccaacggttcaacaaccagaagcttatatcggcaatgtcatgaacttattagatgacaatcaagaaatcacaaacccagatacacttggtttcttccaagcaatcgttgatgctttcgatacattaatcaaacgctattaatcgaattacacaaaaaacgccccgactttcgtcgcggcgttttttattttgtattagtttaccaattcgttgcattccagattcgaccatcaagttcaccttggcgttgttcaatccgtaatgctagttcatcactcgtttgttgaagcgccgtataaaaagcttgctcttcatacgttgtggcttgttctttttgtagttgaatttgttctgttaaccaatccattagccttccccctcttcttcgcgaatcagttggacttgccaattcaaatcggttaattccgatcgtttgtcggcgaattgttcgcttaaaagcattaaacgttgttgcgcttcaggcgatgtggcttcagcagcctttttagtcagcatcgcttcaaaccacgctaattgctgatcaaaattgaactcggattgcgtcaaataccgttgataatcgatgaccaagcattgtttatcagtttcttgccaataacccaattgatgaatcgcaagtggtggtaaataggtcatccctagcttacgagccaccaattcatatgggcgcaaaatttcagacagcgttgcttgttcactgccgccagcttgaaaatgtttagccgccgtaccagttgaaacgacaaccccgagtgttttcccggctaatggttggcggccattaaaggcaaattgccccgttaaaacggtgtccaaccacatttttaagctcgctggagcagcataccaatagagcggaaattgaaaaataatccgctcatggttgcgtaataatgcttgttcagcagccacatctaacgtctcaagcgcatctaagtggtgccaagtgatggcttccagtggtgctgcactcgcttttaaaaagttttggaccatcgacgtctcaatttcgggatggctgataatcaccaatgttttcatactctgccaactttctatttctaaagtttaattgtacaaaaacatggcgtaaattgcgactaatagagttccaaatattgttcgcgttcccattcggaaacttgttgacgataagctgcccattccaatgatttagaatccatgaagctctggtagagataaggccccattgaatctttgataatctcatccttggctagttccttcaatgcattgtgcaatgtggatggtaggtcagtgatgtgattttccttccgttctgtttcgtccatgctatagatgttgcgatccacaccagcatcaggcaagagcccttgatctaagccagataaaccggctgccaaaatcgacccgattgctaaataaggattggcacttggatcaacactccgtagttcgagacgcgttgataacccgcgtgattgtgggacccgaatcaatggtgaccggttatgaccagaccatgcaacataaaccggtgcctcaaaaccagggactaatcgtttgtaagagttaactgttgggttgttgattgccgtgatggcgcgtgcgtgttgcaataagccagctaagaaatgataagccgtttcggaaagttgttctgtacctttttcatcgtagaaggcattcgtaccatcttgattaaagagtgacatattaatgtgcatcccagagccgttgacaccgtgtaatggttttggcatgaaggttgcatgtaatccatgtttccgagcgattgttttaacgactaatttaaaggtttggatgttatccgctgcatcgactgcatcagcgtatttaaaatcgatttcgtgttgtccgggtgcgacttcgtgatgactggcttcaacttcaaagcccatcttttcaagttccaaaacaatatcacgccgacagttttcgcctaaatcaacgggggcaaaatcaaagtagccgccttggtcgttgagtttcagcgttggtttaccgtattcatctaatttaaagaggaaaaattctggttccggtccaatgttaaagtctttgaaccctttatcttgcatttcgcgcactaatttcttcaaattattccgtggatcgcctaagaatggttctccatctgcggtatagacagaacagattaaccgcgcgacttttccatgttccgcttcccatgggaaaatgagccatgtacttaaatcaggccgcaaatacatatcactttcttcaatccggacaaaaccgtcgattgaagaaccgtcaaacatcattttgttacttaaaactttatctaattgactaattggtacttccacattcttgataatcccgttgatatccgtaaacattaaacgtaagaacttaacgttttcttgatccactaattgcttgattgcttctgctgtcaatactttacgtgccattaatccgtcgccccttaatataatttagatgattgtgaaatggttgactgttgtccaactaagccgccgaccgataataattcattggccaataaccgccgcgctttttcgtctgataattgtttatcacgctgccgatccgccttcttctgataaatctggcgaatctgtgccatcgtggtgccttcagctaggtaatccttgatttccaacaaacgatcaacatcgttcaacgaaaacaaccgttgatggcccgttgtccgttcaggaaaaacaagcgcctgtgcttcataataacgaatttgacgcgcagtttgtcccgtcaatttcattaccgtaccaattggtaaaactgctaagttgcgccttaagtgtttttcagccatccatttcacctcacttgcgttttatcttaccagtcgcctttcaaacggtcaacatttgatgtcagattttctaacatcagccaacaaaaaaaggtaaaccaatttggtttaccttttaggcattagtcttcatcgatgatttgaatcaaaccacctgcaagcataaacaaatgcgttaccaccggtccaacaaatttaaactggcgcttctttaactctttcgcaagttgcgtactgatcggcgctgatttatcggacacgccagccatttgtgaatcaagcaattgcggctgaccatcaacaaacgcccacaaatacgctgaaaaactgccatattcagtttggatggcttgaattgcccgcgcattttgaatcgttgcccgaatcttacgcgtattacgaatcatatctggttctttttgcaggcgttcaacatccatttcatcaaattgtgcgacttgatcaatcaccatccccaccatttgttgtcgcagaactggtattttacttgcagctactttccagctcaaccccacttggaagaccccaactgttaagagttcaaaccaaatacgatcatcgtgcgttggcgtgccaaaataattgtgataagcctgaaccccatctgtcgccgtttcaaagttgttttttgctgtttcatctaccatcgataaaccgcctgtcctgcgctttctgctggaaccccaactttttccgctaattcgctgtaatgtacctctaaataattaaagcagtcagttgtgtcatgcgtcataaaataaggcagcaaagccatctgatcatcaaattgaacgtgttcctgttgtgcataagctttcagaacttttgccaactgaagaaaatcctggttggtaatatagtatggtgctacggattgctttgtatcaaccgtcacgatggcccgataagcgtgcccgataccttgtaacccgccaatggttgatggtccagcagtctgcatgaccgcataatgaattgttcgaatttccgttgtcgcaagttgcttaacaacttttgcgggcatgacttttaaaacatctgtctgctttaaacaaatttggcgcggttctaatacaattaaataaggactccgtgcttgccgccaattcgctggcattgtttggccatcactagtaacagttacatccgtcaaagtggcactgaactgttgtgctaaatccacatagtgttgttcgggttgttgcataatccgtcctaaatcggacagcggttttgtattttcgctttctgccaaatgccaatgttgccgcaaccgcccaaagaatgaattcggtttagtgaccgtttcaaccccgagcaaagtattcaaacttacattatataatttggcaagaacaaccaatgtattcaagtctggtgcacttttatccgtctcccatttagaaatgacttgtcgtgacacattaatctgctctgcgagtgtctgttgagagtagttcgcatccaaacgaaattgttttaattgttgaccaattaacacctaaccacctccaagacttaccgtagcgagaatgacacatttatactagcaacaatccaaagcatctcttaaaaccgaccgctacgattcgttgcacccttatcataccatgcttaacgcacaaaaaaagcggtcaatcaaacgcgaatttgattgaccgcttggcatttatttttcaaagaaggttgtttggactgcccgactaatcgcgagtttaacgtgcgcgtaagttaacccaccttgtaagtaaagtgtatatggggcgcgcaatgggccgtctgctgaaaattcgatgctggcaccttggataaaggtcccggcagccattacgatttgatcttcgtaaccggcaaaatcacttggaatgggggtcacaaatgaatcgattggtgattgcgcttgaacacaaccagcgaacttaaccatatcatccggattaccgaagttcaccgtttggatcaagtctgttctaggggcatcccatttaggtgagacactcaagcccatttgctccaaaagcgctgcttcaaaaacagcccctttaatcgcattaccagtcacacttggtgctaagaagaaaccttcaaacatcaattgcagattgccttgtgtggcgccttcactggcaccaacacctggcacagtcaggcgataaccaatcatttcgattaatttttcagtcccgacgatgtaaccacccgtttgcgcaatcccaccaccagcatttttgattaaagaaccggccattacgtcggccccgaattctgttggttccgttgtttcagagaattcaccgtaagcattatcgacaaagacaatcaattcagggttaatgtttttgacaaaggcaatcatttccttgattttatcaaccgtgaaactatcgcgatcagcatagccacgtgaacgttggatagcgaccacttttgtcttagctgtaattttggtccgggccgtttcaaaatccacggcaccatcagctaataatggcacaaaatcgaatccaatttggaattcttttagtgaaccaatcccgttaccggccatcccgatgacttcttgcaacgtatcatatggttcgcccgtaagatataaaagatcatcgccaggccgcaacatccccaataaggccgttccaatcgcgtgtgtgccggaaaccaattgcggccgcacaagcgcatcttcagttttgaaaacgtgactatagacggcctctaacttatcgcgtccttgatcatcgttgccgtaaccggttgtcccgtttaaatgcgattcagaaatattttctgcttgaaacgcttcgagcacctttgcttgattattgatgatttgttcatccagtgcttgtaaacgcggtgcgatttgcgtatcaactgccgcgattttagcttgtaattctggtgctaagtttgcttgccaatccattttttaaccactccatttctattattgctgtaaccattgttgtaaatcggtttgaatccgagccaaatcggcttcaggttgttcaaccagattataccaattgaccggaatctggtttctaaaccacgttagttgtcgttttgcgtagtgccgtgaattttgttttacttgagcaattgccacgtctaatgaacagtcactatcaaagtatgggaagaactctttatacccaatcccccgcacggcttgcggactcgtttcacgatgtgcataagccaaccgcgcttcttctaaaagtccagcatcgatcatttgatccacccgctggttgattcgctcgtataataatgcacggtcacaattcaatccaataataaacgtatcataacgtaattcttttggcttttgttgtgaaaacaaagttcccgttgtttcataaacctctaatgcgcgaaccacacgccgtggattcgcactcggaattttagcggctgcttgcggatcaatttgattaagcgtctgccacaaagcttcttcagaatgctgatccaaaaaagtttgccatttttgacgaatcgtaaaattctgttccgcatcttgcgcactacccagggtcatatcgtacagtaacgcctgcaaataaagtcccgttccaccaacaaccaagggcatgtgttgccggccgacgatttcagtgacgagttgttgtccttgctgttgaaagtcaaaggcagtgaagcgttgatcgatatccgccacatcaattaagtggtgcggcgcaagcgcctgctcttttggtgtgactttggccgtaccgatgtctaactggcgataaacctgcatcgcatccccggaaataatctcaccttgcaactgttgtgcgagttgtagacttaacgctgttttaccaacgcctgtcggaccaacaatgacgattagcttttctttttccatattttcaccacattaattaacgtattttactagctattcgcgcttaaatacgcgataataaagttgtacttgaatgaattgagacttgaggaggctttacctatgaaacataaatttctaaaaggtttcgtaatcggaaccgtttcaacagtcggcgcgattgccggttcactcttggcatttaagaagaccgtcgttgatccaatcgaagaaaaagaaaatcaaattgaagaaagtcgtcgacgtgctaaccgtaagagccattcagctcaccaaggctaagcgctttgaaaagactgcgtccgttgcctgattggcgacggactttttttgtggaaacgtgctttttaaagctgactcttgggattagcttcgtattgcaaacgaccgactttgtcggtcattaacaatactatgctaatgctcagagtcaaaccgctttaaacgcactctgttttgaaacgtgcgccgccagatatactctttcggttagttacataccgcaaacgatcggctctgccgctcatttacggtatgccactaatcctcagagtatgaccatctgcctgcgcactctataaaaagcccaacagttgactagtttttttcgctagtaactcttgggcttttttggtttaatttaatttctttttacgctttgttttgccggtccaaccagcataaccctttttcaaccatttaatgtcggtgaaaccggcttttcttaacttcagtgctgctcggatactgagcgtaatgcctgcatcatataagtagactggtaagtccatccgtagttcacccatattttgtttcaacattggataaggtaagttgcgggcgcctaaaatgtggcctgcatcaaaatcttttttatcccgtaagtcgacaatttgggccttgcgcattgtttcttcaaacgccgcttccgttaattcgccgcctaagcgtttgcgttgaatttgataatatgcccaatcgcccaagaaccaaagtaaaatggcgatcagaataatattaattactacccatacattaattgtccctaatacaagcatcgataagactcccttataacaaattattgttgatcaaattgaagtgcaagtgaagcagccccgataacaccggctacgtttcctaagtttgctaaacgaatcttagtcgtatttttaacatttgggaatgtaaattcttcaaagtaagcttcaacttgtttacgtaaaaattccccagcagctgaaacaccaccaccgataacgatgtaagcgggattcaacatgttcccaacgttagctaatgctaaaccaaggtagtaagaaacacgatcaacaaccttaacagccaatgcatctgattctttagccatgtcaaaaactaatttagagctgatttcttcaccatcatccaacattgtctttaattttgaattaccagcgtattcttcagccatgtcacgtgcaacgcgcacaacaccggttgctgaagcataagtttctaaacaaccttgtttgccacacgtacattcataaccatgtggttcaactgttacgtggcctaattcacctgcagaaccagcaacaccgtgtaataaatggccatcagcaacgatcccgccgccaactccagtgccaagtgtgacaaaagcaacatcgggttggttttcaccagcacccttccaacgttcacctaaagcagcaacgttggcatcgttatcaattgcaagcttcatgtgtgtgccagcttcgatatcgcgacgtaagtattgggttgtcttccagtttaagttgtaagcaccaataacggtcccttctttactgttaacactaccaggtgtgcccataccaatcccgatgaaatcagcaggtgtcatgttatataaatctaaatgatgattaatcgattcaatgatatccggtgtaatgtggctaccttcatctaaaatatccgtatcgatactccagcgttgttggatttcgccatccattgtcataattgcaaatttagcagttgtcccgcctaaatcaacgccgattaacttcttgtctgtcatttaaacttctcctccaataaattgtgattaaacgcttcatttttctccaaccgatgttcacgcactaaaaccatcttagcatcacgatacactttgccatcgattaaccccgcatcataaacgtgccgtaattcgatactggtgagctcgatatcccaaagtcgtttaccaagatggacgtaaacgccaaattgttttaaaagttgttgtacatcatatagagttctcatcaacttcacctttaacattatacataaattgattaatgattcatacccagaaaaccaaataaaatcatcgttgcaacataaattaacccactcaccacacggttcagcgggttaatcttacccactttaggtgcacccagcgccatactacttaaaaagccgccaagtaccccacctaccattgcgtacaatgcattgtgatcgacaataaattgtaatccgattgttaaaaataaaaacagccaatactggcgtgccacttgtcctagcacggattcttctttaaaggcatcacctaacatcaagaagccaccgaatagccctaagatagctgttccagcagtcacggttggtgtatcgagaccaaaaaaagcgcccgttgtaaacaaactcgccaaactgctcagtatatagatagctaataggcgccagtgtcctaataatcgttcaagttgtccaccaacaaaaaacaaaataaccaaatctacgaagagattcataaaccggccatgattgacagatgccatcataaacccaataatccggccattcattagcatgttaaccgatgtaaagccgttcaaccatacaaccggattcaaaaacatcattgcaaacatcaaaatcgttagtaccatcaaggcatacaccacaatcggtgcgtcttgccaacgttctttaaaattagtcatcttttctcctttagacctgaagaacctgatcgagttggatatcgaattcatcaatggcccaatcagcacttcgttgttgtggtttaagcgctagtgcaacagttggcattggatatttggcgagataacgatcataataaccgccaccaaaaccaacccgccaaccttctggactaaatgctagtcccggcacaatcattaaatcagggattaacacctggctcccagctgtaaccactggttctaaagcaccataggaactcgttgttaattcagtggttgccgttaacgggtaaaaagccatttgtcgctctggcaatgtcttgggcactacaacttctttaccggccaaacgaatggcatcaattaccggctgggtcgccatttcaattggctgactcaacgtgacaccgatgattgttgccttttgaaacacctcggttgccattaacaattccaaaagttgtgcttcttgggcatgtttaagcgcaggcgtctgcgcaagcgtttgtaatgccgcaatttgttgttgccgaatttgctttttagtccgcattcaaaagcctccttaacaaaaaaagcccgagcgcgaagcgccccgacttttgatgtgcgtcactattatttagtttcgcggtgtaaagttactttgcgttcgcgtgggcaatatttctttaattccaagcgatctggattgttacgtttatttttgtttgataagtaactacgttcgtgacattctgtacattccattgtaatgtgaacacgcattgatatagcctccaagctgtaagtaaatttctaaaaaactgtttaattcttagactcttagtatcataccattttttatggtatctgaaaaggttattttggaatatttcattcagtaatgttatttaatttatagaaactcgtaatcatttcacgggctagtaacgtattgtagtgccctttatcagagtttaagttcgggaacacaatggcgattgccacttgcggattatcgtatggagcaaagccaaccaaactagaagtaacggtttcgacttgcttacttgtcgaatcgtttggatcttcacgggcaaatgattgtgccgtcccggttttagcgccaagcgttggtttaatatctttcaaggtgtgtgctgtcccccaagcgttggtcccattgacaacgttgtacatcccttttttaacgacattaaagtaactttcgggcgcatcaactgtgctaagcactgtcggcgtggtcttggtaccaacttggccagctgacccatcgttaccagtttgttgaatcgaatccacaaggtatggtttcattcgttgaccaccgtttgcgatggttgaaatgtattgtgccaattgaattaaggtgtaggcatcgtagttaccataagataaatcaagtaatgaaccattggctggctcgccatattcattgacggttggcccttcgatcccggtggcttcacctggcaaatcaatcccagtcttttgtcctaagccaaattgactgaagtagccacgcatcttcgtaaagatatctgaatccatcgttaacgaagaattgggtacatatttggcatgcccttctaacatcgctaattgcatcatgtaaatattagaagaaacttccaacgctgattcagcgttcaatgatccaaacgtcccaactgggtaaacagatttcttaaccggcgttcctcttaaatagattggtgtatccggtaaggtattattggttggcgtaatcacaccatccattaagccccccataacggtcgcccctttaatagcagaccccatgacgaaggtgtgattaatcaccccgagcgcatcatcggcaatttcacctgacttacgatcgttggattcgccagccattgctaaaatagcacctgttttcggattcatcgccacggcataggcaccatcagaatactgagtggctcccgctgcttttgcctgatcatagactttcttcaaagccgcttccacttgcgtttgataagcttggtcaattgttaaatttaaattactccctttttgccctttaaataagacattacttgagagaatctgattattcgcaccaacttcaacttgtgattgcgacttagaaccatgcaagacactttcgtattgcttttctaaataactggtcccaacgcgatcattacgcgaatagccctgtgctagcaaggagttaacgccatcttctggtaacccttgctcttcagttgaaacatgcccaataatactgcgcattgaatcgccattaggataagcccgttcccaatcggtgctgacattaatccccggcaaactcgttagatgttcactgatttcagcaatttccttatcagtcacatccgtatttttaatataaactgtcgataattgataagccccactcataattttgaaaatcgcagcggcttgtttttgttgctcgtttaaccctttaaacgactttttaaccaattcgattgttgattgataaaccttcttttctggcaactcagaaccatcactggcaaccttcgcagatttaggcagttttgcgttccattttttaagattcttggggttactgaggtagtaatcaatctgatcacgttcagttaacttatccgtcgggaccgttaaatattgggttaacttattgccctctgcatacattttgtctgccaagacattcatattcttcgtataagtaatcgccggtttagcagtattcccaactaagacacggccctttgaatccagaatcatccctcgaggcacgttacctgtaacgattttcttatcagtactgttgaccatcgcttgaaaattagcgccctccatcacttgcaggcgtcccaattgcataatcaacgcggcaaataacgcgaagacaacgaataataggaaatttaagcggaatggaatcagtgatttttcacgattttgtttgttttttctcttaatgattttcacagacggtcagatactccttatttagcgccgctctagtaaaagatggcgccgctctatgcttcaaaaagtcgccaagcgaccttttgagcgattttgtgctgtattgtttaagtttagcaaaattatcttaaacaagctatgccaaatctctaaattcaaacgagattatggtatgcttaagcatagtcattaactggttatattttacagcttttctcagttaaaaacggactagcaacctaatttttagatttttttattaattggaggattaccgtgagtcgattttacgcttttgcacgtcgtcattatacattaggccttagtttcttactaccatttggcattttatttatctacggactacttcgacaagtgttcccttttggagggcaaacaatcctgactgttgatctaggccaacaatacatcgatttttacgcttttttcagaagtacgctattgcaccatcccgaaacttttttttattcctttgctaagggcttagggggcgacatgcttggggtctgggcttactatttgatgagtccattcaatctaatcgtcctattgacaccaggaacttggttgagttttggtgtttggctgcttgtccttttcaaaacaggcgccagtggtcttagctttgcgtactacttaaaatctaacaaactactccatagctggtggttaccgacacttagtgttgtctacgccttatccgggtttgcaattgccaaccagtttaacgttatgtggttggatgcactcgtctggcttccactagttgtcttaggcatcgaccggctctttacaggccgtcacttttggctttatccattgagtcttgccgcactcttaatgagtaactattatatgggctatatggtttgcctgtttgtcattgcttattttgcgtgggcttgtgctcattattggcaaacttggcgccatctatggcaaagcgctgcccgcttcatcagtggctcactcttggccggtttactctcagcctggctcctattgccaacttttttccaattgacgcagagcaaagggcagtacaccattcaaaagattcattggaagttcgaatataatccgcttaagatgctttctaaacttgtgattggcaattttaacttcgaccaaatgccaaaaggcgaaccgaatatattcgtcggcagtctcgtattgatttgtgccatcttgtattttggaacacgcaagattgcctggcaagaacggttagttgccttattagtcaccattttcttaggtgtttcaatgtgttatgaaccccttgatttattatggcacggcatgcaatttccggtttggtatccttaccgcttttcatatgtggttagcttttggctaatcgtgctcgcggttcaacggctccaccagcaccttcgatttagttggtatcaactcttgttgccgtttttaatgttgatggcggcttttggttatactgccaaacatctcaagagcttcaccgcgctaagtcctaatcagattaacttaagcatcgctttcttactgatgacatgcttgcttttactcctgaaaaagccgctcaagcactattatcctttgctcttagttctatgcgtcggtggtgagatggtcaccaacgcgacaatgagtcttaatcaaattagctatgtctcacaaaaagattacgcagattatacagctcatttacaatcagccattagcgcaattccaaataaaaccgcgtttcaacgaattggcaaaacctttatgcggacaaaaaatgacccgatgcaagctgattatttcggcggatctcattttaattcgatgctcgaactgagctatccgaaattcatgggcagcattggcgaaccagctggcgatggcgccgttgccgatactaatcagaccctgttcaccgatgcgttattaggttatcgctactaccttaacaatactagtgggcaagcaacaattccactcagtacgaataagccggacttagcacgttataacttactcaaaaaaaaagatcaaattgcaatttatcaaaaccccaacgcacttgatttaggctttgcggcctctgaaaaagtgcttaaacatcatgtggttgccaattatcccatccttgaacagaaccagattgcggcagacttagtcaattcagcgacagaacagccactcttcacacttcaatttttcaatactgtcacttacaagaatgctaaacaaaaaccaaaactcaacgaaactttcctccgggttgatccgaagaatccagctcacgtcatctataccttcacacccacaacgagtgacccctattacctcacattaggctcaaacctcgaaaaaaatgcggttcaggtctcattaaacggtcacacgctacaacaatacgatactttccgcgatactgtcgtcttaaacctgacaagtaacgcaatcggccaacaacaaaccgttgaccttagcttctctaaaaaggaaatttggctccaaaatattaatttatatagtttgaattatcaagcattgacgcacctaacgcagcaacttcgtgcacatgcattgaaactgaatactttctcaaacacaaccatcaaaggaacgatcaccattcctcaacaaaaccaagtcctcatgacaaccgtcccctatgctgctggttggcatgcaacggttgacggccatccggttaaaatcaaacgcggcttgaagaacttcatcgccatcccgctgaaaaaaggtcaccataccgttacccttaaatactggccaccttatttctattggggtttgacgatttcactaatcagcgccggctttgcaattggtggttattacagctacaaatactaccgccgccgccacttattctaaccatcaaaaaaagccccacgcactcaatttaaaatgagtgcgtggggcttttttgaatctattcagtatccgttcgtgctaagatcagtgtattttcggaatagttaatgtttttgcgtaattcatctgcaagttgccatgaaattttatgttgttccaataactcttgaatcgccactcgttcactcgtgagcgctttgattcttaatttttgtaattgacgttcatagatagcagtcttactccgccccccatttttcatgttttcaatctgattccgataccgcacaataatttgataaataacctgacgattataatgacgttggcgattttcaggctgttttaggaaatacgacaattgtttaattcccgccttagccatttcacgttcagtcaattgccactcggtttcacttggtgatttggtatgccgcggccagagatgcgtcaaaaagcgtttgctgattgaccaagcacgatagacttgtagttgcacatgatgccaattaaaactcgtcccaataaccgataacattacttgtttttgccgtaacttacgtttaccatgccgatagcttttagcactaatggccttttcagcccataataactctaacttctgacgttctccgtcaaatgccacttgtcgcaaaatcaactcttcagcaattaacggtggtagttcgtcacttgtgcttgcttcgctttgttgactctccaaccggcggatcatcaactgatactctgccaataaatctaaagcagcccggttattatcaatatgccgttgggattcgaccatgctcgctgctactttgtacatgtaaatcttagcgtttgtttcatccaataaatcagcagctgcttcatcttctgcggctgcttcggcttcaagatctcgttgcatccctcgcatctcgattggtgctttgacttttgtcagcttaggaattaagacaacggccatcaccagactgacaataatcacgccggccgcaataaagagcattaagccgcgttgaggaaacggtgaaccatccgctaaaacagttggcaccgataataccccggccatcgtaatcgctccacgaaccccagaaagtccagagagcactgcaattttaatgttttcgcggaatgttttgggattcgtctggttggtgtagagcaagtaagctagtgtccagagtccccgcacaatcaccagaatcaaccaaaccgctaagacgaggagaatttcttcactcgtattaatcagcggattatgcacggtattatgcatagcgacaggtaattcaatccctaaaattaaaaagacaatcccgtttaataagtaaacactgattgaccaagtttgttcggtcactaacttcaactccggtaaaaaatcgaggaagatattccgtgatgaatgactgatgatcccagctaccaccaccgcaatcacaccggatgcgtggaatagatcttcaacaattagatagatgataaacggtgtcaccaactgtaaaatcgtatggaacatcacatcttcaaagccttcttgtagcataaataggcgaataaaatgaatgattaacatgataatcatccccgctagtgcgccaacaatactaatatacagaaaatcgcccgcggcttgttgccatgagaaatagccggtaacagcggcagcaatcccatatttaaagctaatcaagccactggcatcgttaattaaactttcaccactcactaagtgcaaaacccggggcggtaaatcggcctgttctgaaatcgattgtaccgccaccggatccgttggcgacaagattgccgctaacgcaaaacttgcagccagcggtaacgccgggactaaccaatgaatggccaagccgccaattaacgtcgttgcaaagacgaggaaaatcgcattcccaataattggtccgcgcaacgcccatagttccttcttaggaaaacgacggccatcgttaaacaataatggtgcaacaaacaccaacatgaaccaatctgtttttagtggaatcttgacggcaaatactaacgccaccattaatcccaacccgatctcaattaaactaaccggtaaatttggcaaataatgcccgatgatattggcaataatcaccaacgtaattaacaaaataacagcttcaataattgccatcccaacaccctttctttttaaaacgctcatcctgataaaaaagccctgataaaatcatcttttaccatagcttttcatcattgatttaaccttgcttatgttgcccaataatccggacttctggttctaagcgcacattaaacttcgcccagatcgttttttgaatgtattcgatcaacgtcaaataatccgttgccgttgcgtgatcaatattcacgatgaacccggcatgttttttagaaacttgtgcgcccccaatttgatgcccttgcaagcccgctttttgaatcaacggtccgacaaaatgaccgactggtcgtttaaagacactcccacatgagggatattctagcggctgtttggcagcccgcaaagcgttgacctcatccatccgggcgcgaattgttggtgccgcacccgttgccatttcaaaataggcaaccaacacaatactgccgttatcttgaattaaactatgccggtaactgaagtctaagtcagcggccgttaacgtctgtacttgattatcgcgcattaaaacatcaacgcgggtcagtacatcactaatttcgccaccatatgcgccggcgttcataaagaccgcaccgccaacactaccaggaatgccggcagcaaattctaagccggtcaaactaccgctataagctgcttcagaggtttgaataatccctgctccagcttgcgcagtcaccaagttaccttcaactttaatctgattcatcgccgttaagatgatgactaagcctttaatgccaccgtcacgaacaattagattactagcattaccgataattgtgatgggtaatgtcagttcattggcactggccactaattgccgcacttctgcaacagatttggggagtgcgagtaaatctgccggtccacctgttttggtaaaggtgtataagctcaatggttctgcttgatgaatctcgattgcttggtttgcttgtaaaaatacttcaacttgacttgtcacaattgtcgttcccctcaaaaaataatctactcctagtttaacaaagacggcttgaattgaacagccaacactttttttgcgtattattgactagaccgttaaaatggaatttagaaatgaggaatcgacaatgaaatttatttcttggaacgttaatggcttacgcgccgttttaaaaaaagactttatgatcacttttaatcaactagatgccgattttttctgtctgcaagaaactaagatgcaagccggccaagttgaattagatttaccaggttatcatcaatactttaattacgctgaaaaaaagggctattccggtactgccatcttcactaagcataaaccgctcactgcaacttatggtatcggccaacctgaacacgatcaagaaggacgcgtgattacacttgaataccctactttttatttaatcacttgctacacacccaattcacaggataagttgaaacgattagactatcgcatgcgttgggagaatacctttcaaacttatatcgctaatttatcgactcaaaaacccgtcattttctgcggtgatttaaacgttgcccatgaaccaattgatctgaaaaatgataagaccaatcatcataacgccggcttttcagatgaagaacgagggcaaatgacaaccctcttaaatcgcggcttcaccgataccttccgttatttctatcctgatcaacccgatatttattcttggtggagttatcgattccacgcccgcgacaataatgccggctggcgcattgattatttcattacttccaatgatctccaacctaaattagtcgatgccaagattcacacggaaatttttggttccgaccactgccccgtcgaacttgacacgcaagatttattcgcttagaataagcaaactttataaaaagcgaggttcaaaataatgaattttgtcgcaatggattttgaaaccgccaacggtcaatggcatagtgcttgctcacttgcccttgttgttgtgcgcaacgatcaaatcgttgatagtttttatacgttaattaaacctgaaacttattttagcagtcgcaatacgcaaattcatggcattcatgaagccgatgtggctcaagcgcccaagttcaatcaagtctggccgcacatcgcaccatttttcacgccaaacaagttagtggtcgcccacaatgcgaattttgatattggtgtgttgaaaagtacactccaacactacgacattccagaaccccattatttagcgttggatactctcaagacgagtcggcggttgtatccgcaatttgagaatcataagttaaacaccttgtgtgataacctagcgattccactcgacaatcaccacaatgcactggctgatagtatcgcttgtgccaagattctgattaaagaagccaacgattttggcgttgaaccgctaaaagcggccaccaaattaatcggctaacaaaaaaagagcggttaacttgtctatgcagacaggctaaccgctcttttagcgaatggtggattaaagctaaattgtcattagggcttcgacaagattaacaacttcatcataatcattaatttgttttgactaatgtacgagctttgtttcgctgttaattataccacaattcggttcatcgtgttaacttattttgacttagattgaccaagactcaagataaacaccgtactgatcacgagaatcccacccacgacttcccaggtgttgaaactcgttttcaagaataaaacagtaccgatagtcgcagctaatggttcaaaggtattcaataaaccagccgttgtcggtgtgatataccgtaaactccccaagaaacaaagattggcgagcgcggtcccaaacaaagcaatgaataagacactgctgattgttgccacattcaacggtggaacaccgacccaaaatggatgaacaaatgtgaagaccaccccaccgattaacatcgcccagcccacaatcactaatgttggatatttttggaataacttaaccggaattaatgtgtttaaagcgccagaaaagccaaggcataaactaagtccgaatgccgcgtgtgaaatcgccaaatgtgtcagttgtccttttgtcactaacaaccacgtccccaacaatgcaacagtcactgcaattagttcaacgcggctaggtgctctacgataaatcaccaagctaattaagatgatcatgatggtgcctagctgttgtaaaatcgtagtcgttggtgcattgctggcttgaatcgttagaaaataaaaatactgaacggccgataaccctaatactgcaaataataacatccgcgtaaagtcccgcggttgccgccacactgtaaaaacatcgttcggttgtttaatgagcgcataacctaatagaaataggcctgaaagccccatcttaacccccattagccattctggcttaattgccgtgtcagtgaatagccactgtgatactggcccttgaatcccccaaaatattgatcctaatacggctaagtaaattccgcgtcctcgttgttgttgcatcttaaatctcctcatccatattcattaattggcacatttgcacaaccggaatatagcccgtttctggcgcataaaatccggctgctaattgtgcttcggtcacaaaaccaaaccgtttgtaaagtgcaattgcacggtgattacgggcttgtactgttaactcaagccgtcgcggatttcctatttctcgaaccgacgctaaaaggtgcgccatcaaatcagagccaattccgcgatgccacttcgcttttaaaacagcgatactaacttcactgatatgtgttagcccctgttctgtcggactattcacacgaattgccccgacaatttgctgttgatcaaaagcaagcaataatacatcttgttgcgattcaagaatacttgctatcaaaaattcagtaaataatggtgttaaagtggctaactccgctggtaacgcaacataccgtgtttctttagcgaccgcctttagaaagcataaataagcccgcgcatctgctgcttgcgcgggccgaatgtcaattacactagtctgcaaaactagtacgcaccaatgcttcgtagtgagcgccgtgcggatcaagtactaacgtccgaacttgatcatcgctaacatccttattaaaatgaatcgtcaaataatcgctcggtagttcttcagcaataaattgactccattcaaccaccgaaaccccgtccccatcgaaatactcttctaagcctaaatcactggcgcccgtttcttccaatcgatacacatccatatgatagagtggtaaccgaccgtcttgatactcacgaattaacgtaaatgtcggactcttaatatagcggtcaattcccagaccagctgccaagcctttcgtaaacgttgttttaccagcgcctaaatcaccatccaacaacaagacatcaccggcttggacttgttggcccaactgtttggcaatcgcaattgtttgttctggatcagttgttttaaattctaacatgttctgcctcattctaattgttatctgtgtgtcattataccgaaaaaagccctgttcgcaaagtcaaagacgccagcacaatttttctgtgctggcgtctttgttgtcggtcaattagttttgtaatgcttgagcagccgtaatgatggctaacttgtaaacatcttcttcgttgctcccacgtgataaatcagaaatgggttgattcaaaccttgtaaaattggtccgatggcttcgaaattcccaaaacgttgggcaatcttgtagccaatgttccctgattgtaattctgggaaaacaaacacagtggcttgacccgccacttttgaatctggtgctttttggttcgcaacaactggtacgtatgcggcatcaaattgtaggtcaccatcaatgtctaattctggcgcaatttcatgtgcaatccgtgctgcttcttgaaccttcgtgacttcgtctgctttcgcagaccccatcgttgaaaagctcaacagcgcaactttcggatcgatatcgaacaactcagccgtctttgcagattccacagcaacttcagccaattcttgcgcattcgggttaatattgatggcgcaatctgagaataagtaacgttcgttatcgcgaccgcgttgcataatgaaggccccgcttgtgcgttggacacctggttttgttttaataatttgtaatgctggtcgaacagtatcgcctgttgaatgcacggcacctgaaaccatcccgtcggctaagtttaaataaaccagcatggtgccaaaataattaggatcttgtaaaattgtttgtgcttgttcaggggttgccttgcccttgcggcgttcgacaaaagcggcaaccattttttcaaagtcagctgttggatattcttgtggatcaataatcgttatcccgtccaagttaaatcctttagcagcagcgatttgttgaatatcattcgttgccccaattaaaatgggtttcaaaatccgatcagcattcaaccgtgctgctgcaccaataattcttggttctgttccttccggaaaaacaattttaaattgccgattggtaatctttgcttttaagctttcaaataaatccacaattgcaacctccagtaagcattttattattgctaatgtaatcatacaacgtttctaataccgcgacaagtcaacaatggtaacgcttcattattctaccgtgactgtttgtggtaattgccaattaattggccccatgccccattgctcaagggcagtattcgtctgtgagaaaggtttagagccaaagaaaccgtgataggctgacaagggactgggatgtactgcagtaatgaccgcattttgcgtctcatcaattaaccgccgtttatcctttgccgcgtttccccataaaatgaagaccacatgtccccgatttgacaatgcagcaatcgccgcatccgttagctgttcccaaccttgtttacgatgcgaatttgattgacctgcccgcacggtcaatacggtgttcaacaagaacacgccttgatccgcccaactctttaaatagccatgctgaaccggttgaaagccaacatccgtctgcaattctttataaatattttgcaatgatggtgggactttgacccctggtaaaacggaaaaactacacccatgggcttggttcgggccatgataaggatcttgtcctaaaatgacgactttaacctgttcaaacggtgtccattcaaaggcttggaaaatatggtgcatctctggataaaccgtggtcgtttggtattcctgtttcaaaaaggtatggagctgaccataatagggtttggcaaactctggtgcgagaatcgtttgccactcattgtgaataattgttttcatctgctcacctcattaactagtttatcgtgttttaacataagttgctagaagaaaagtagcttgcatgctaagatagaggtaagtttctaataatacgttttcaggaggaattcctttgatttcaattattgcatctgatatggacggtaccttattaaacgacaaaatgcaggtttcagacggtaacatgaccgccattaaagctgcccaagacgccggcatcgaattcgtggtggctaccggccgcagtcgttctgaagccctccccctaattgacagtgatgacatccaacctactttaattacgatgaatggtgcccaaatttttgattctttaggtaatgaagttttgaatgtgccgattgattccgaaacggtgacagccgtcacagaaaatttacgcgaaaataatatttacttcgaactcatgacgactgccggtaattattcagatagcaaagtcagtcgcatccaaaatgtcgctgatttactcgtcaacctcaatcccgatacgagttataaaattgcggttgctttagcagcagcccgtttggaattaatgaatattaactacgtcgatgatcactatcaagggattattaacgatccaacggttaagattcttaaaatcatcgcttttagcacacagggaatgaccgaattagcaccaattaaggcattttgtgaagcccgcggggatttagttgtaacttcctcttcaagtaataacatcgaaataaaccacattgacgctcaaaaaggcatcgctttggccgcctatgctgaacaaagagggattccagttgagcaaacaatggcaattggtgataacttaaacgatttttcaatgatcaaaacagctggcattggtgtcgccatgggcaatgctgtcccaacaattaaggaacttgcgaactatcaaactgcaactaacattcaagacggcgtcgcacaagcgatttatcacgcgattgacttgaatcgtacagctgaaaagaagtgatctttgatgcctattttctacattaaacaccaggctagtgcttcacgtggtgtctcaaccgtgattgacgatcaagaacaaccgcgttatttacttattggaaagcgtgggattcggcatgacgtattcagcctttactcactcaccggcgacttactcggtgaaattcgccaagtcacaattagcccctcacctgactttgaccttttccaaaacgatgaacggattggtcaactcaaaaagatctggggcgtctggcatgagtttatctatgtcaaacaacttaattggttaattatgggagatttaacgcaaaatcaatatcgcattatctaccatacacaacccatcatgcaagcgaccaccattctagcaagcagcggtccagcctttcaattgactgtcaaccaagaaaaggatatcgtcccctgtattttgattgccgccgttttaaatcattgggcctataaccaacccaaggcactgattcggcgttttaagcctagtttgcgattcgaatagtcagtaaaaaaacgactaatcaaatgattagtcgttttttggtctagctcaagactcccatcgaatatatataagcgctaacatttaaaattaaattgattcttttcttttaaattggtatggttgaatatgcaaacttaaaattaaaggggtcttctcaatgccaactggcgtgattattaattcattatccgtcttatttggcggtctattcggtagtttattgggagataaattatcaactaaatttaaaacagaactcaccttaatcttcggtgttgcttcgatgggaatgggcatcaatgccattattcaaatgaagaacatgcctgcagtcatcttcgcagttgttctcggtactgggattggcctactcattcacttcggtcgctggattgatcgcggtgccgtcttgatggaacggccaatttctaaatttttccgcgtaaaaacaatacgctatcagataccgaatttatttcagcactcgtgacagtgattgtcctcttttgtgccggtgggaccggtatttatgggacattagatgctggtatgacaggcaacaatacgattctaatttctaaatcaattctagatttctttactgctgccatctttgcctgcaatcttggccccgtcgtttcaaccattgcgattccgcaattcattatcttttacatcattttcttacttgccaaactcattttcccactaacgaatccaacaatgcttgcagatttcaaagcttgcggcggcctcttgatgctcgccactggctttagaattgctaaaattcgcgaatttccaattgcagacatgataccagcaatgatcttagtcatgccactgagctggctatggacgacaatgattatgccattactttaatctgaaaagagccgacaacaattgttgtcggctcttttcgtgttaaagctgtttaatcatatgatcatattgatgatcaccaatcattaaatctccttgtttaacaaaacccattcgttcataaagttttttagcgccaggattttgtaaatccacacttaagctaatctttttttcaccacgtgcttttaaataatctggtaaggccttaagtaactttgtccctacaccatgcccctgtgcatgttcagcgacggcaagtgtatctaaataccattcccccggttgtgcttccttatcggtaaagaaacgcgttgtctcaggtaagccgatttgtgggaataacggtgctaatgcatcgtcgatatgggcttccttttcttctgggaagcctacaacaatccccaatacttggccgtcttcttcataaactagtgtgttagcataactataccgatattcaggcattgcaaaggcctgttctaaaataccaaataaatcctccaacggaatcttttggaagagtggcatttccatttcttcaaaaacaatgttaatgattggtaagacactcttggcatctgcaactgttgcttgacgaatcattcaaagacctcctctagtaatctttttatcatacggaggattgcatagcacgtcaactgttatcatgctaaatcagaccggtagtcggccattttcttagcaaataactcaccattggtcggtggcgtgtacgtcaatgcattcgcacccgcttcaatcgtcgctaatatactagcttcgtttttacccccagttgccataatcggaatttcgggatattgttggcgaattgcactaacaattgctggggttttagccgcgccactaacgtttaaaattgaaactccagcttcaatctgcgcggcgtaatcctgtcgttctgacacaacagtacaaataatcggaacgtcaacaacgcggttaatcattttaatcgtctccaccgaggtcggtgcgttaaccaccacgccaatcgaaccggcggcctctgccaataatcccatgtacgcggaccggctgccggccgttaagcccccaccaatcccattaaaaacggggatcgtcgccacattgctgatggcattcatgacagctgggtgtggtgtaaatggataaactgccaaaacagcgtcagcatttgtattattcacaatcgcaacatcggtggtaaaaataattgttttaatcttcttaccgaggatcttaatccccccaacttgtcgcgccacagcaggtggtccgacaacactggtttttaatggtgtataaatctctggtacgaattgctctgtcatccgaatccccctctttattctgttgctttaataatggctactaatcgttgttctagcacgaccaaatcaattgcatttaatcgcgcaaaattgatgcgcaacgcatctgttttaagcccaaataatgatcctggtgcgacagcaagctgatgatcaataaaggtttttaagcgtaatttatggttcggatgggtcacccaaatataataacctcccgctggtaagtaaacgtgccaatcgggtaataccctttcaagcatcttataggttgcttgtgcacgttcttgaagcgtccccttaagttgatccaactgcgtttgaaattgcggatcccccatcgctaaggtcaccatgacttgcgccataatgcttggcactaaatccatttcatgttgcacacgggtcaactgttcgatgacttgcggagtagcagctacccacccgattcggctactagcccccataattttggacaacgaactaatataaataacattatccggatcaagttgctttaacgttgggattggcctagttgtatcaaatcctaaccaaccaaagacatcatcttctacgattggtatttgatgcatctggcataaatgaacaactgcttttcttttttgaaaactcattacgtaccccgttggattttgataatctggattgagaataaccaacttaacacggtgcttaatgattagctcttctaaagcagtcaaataaatcccatcagcatcaactgaagcttcatagacacggacacccgtcgcttcaaacaaagttgagtcatgaaaaaaggagggtgattcaattgcaacagcatcacctggcgtcaataaaccctgtaatattaaaaagagtgattgttgcacaccggcagtcattaataactgctcttcggtaaaaaatagccgtttattgtgttgatccaattgattaattgccgtaataagtggttgatagcctcgtggtgtctctaatgcttgtgcagtaataaaatcttgccacgtcaatgcaggaaattgaaattgtgggactaattctaatggtaagtcacttgaataaacatcaattaacttttcaggttttcgtctaatcagttgttgtaattggcgccgttcattttgactttgtgactgacgttggctgatcaaataagtatgccaattgacccgccttgcctgtggtcgcgcttgctggctgacaaacgtcccgctaccaacgcgacgttcaatcacgccatctgcaaccaattcatcagacgcacgtgtcaccgttgaacgattgacactcaataatttagctaactgacgctctggcggtaattggtcacctgaacttaattgtcctttatctatcaagctaataatcatttttttaattgccatatactttggcttttgttcaggtaaatattgtaaccattcaatcatttttaacacctcttatttagtttacaaattggatggtaaaaaaacaagccaattggctgttgttgaacattctattcttctctatgatagttaagaatagaattttggaggacaactatgcaaaacattctaaccattgccggctctgatactctgggtggtggtggcatccaggccgatttaaaaacgttcgaagccttagaaacgtttggggtcagtgccttaacttgcatcgctacattgctaccagacggtcacttgaaaatccacaacttacctgaggataccattttggaccagcttgatgccattttaaactacgtgccactaacgcacgttaaaattggtttggttcatcaaacggaaactttaaaaggcatctgtgagcgactacgacagcatcctgaattaaccatcatcgctgacccggtcctcgtctttaaagaaggcgccattcttgcgcagcaagcgtacctcgacacgttaaaaaaagaactactgcctttgacgagcgttgtcaccccaaacttgttggaggcccaacaactcagtggtctttcgtcaattaccacgcgtgaggaaatggtcgaagctgctacaattatccaatcatttggccccaagcacgtcattatcaaaggtggtcaacgattccctggtgagcaggccgttgatttattaaaatcgggcgcaacaactcattatttagaagctccacgattggaaacaactaccattgatggcgccggttgtacgctttcggcagcgattgcggcggaattagcacaaggaaaatcgattgaagttgccgtggcacgcgcaaagaaatttgtttatgccggtttaaaagatggtattcatctacgccatggcctggggaatgtctggcagggggctactaaacatgcactttaataaacgtcaattaccattactcgcgatgctcaccgcattgaccgtggcactctctttgttaatcatcatcccgattccggcgacgaagggctttgtgacgctctgtgaggtcggtatttatacaacggcgatcatgctgcgaaatcctggcggactcactgtcggagccctgagtggcctattaatcgatctattatctggttaccctgagtggtgtctcttctcactcatcattcatggggggcaaggcttcgttgtaggtcacctgactcgtaatgattcaatgcgaccaaagcagctgattatccccctcatttgcggtagtatcgtcatggttgccggttactttttagctaccagtttacttttcggctgggctgccggaatcgcttcgattttcagtaatattgttcaaaatggacttggtatcgtggttaccatcccgttagtcactagtttatcccgtattcgaccacaattatttaaccactaggagattttttaaatgacaaacgaattacaattaaaccaaattcaacaagacttaacaaagatgactcaggatgttctaaacgaagcacacttaggaaatggtgatttgttcgtcctcgggtgttcaacgagtgaagtcgtcggtggtcatatcggtaaggcttctagcaaagaagtcggtgaagtcatcatcgcaacacttcgtggcattctcaatccattggggattcatttagccgtgcaaggctgtgaacatattaaccgtagtttggtgattgaacgtcaggttgcccgcgcacacgactttgaaattgtctcagttgttcctgctatgcacgctggaggcgcctgctccgtcgctgcatttgaacaattcagtgatccggttgaagttgaacatatcgttgcacaagctggattagatatcggtgatacggcgattgggatgcacgtgaaattcgttcaagtccctgtccgcccaacccttgatacattgggtagtgcacatgtcacagctttacggtcacgaccaaaatacgttggcggtcctcgagcaacatatgcaccaactcattaaacgcaaaaaaagcctcgttctttgaacgaggctttttgaatattatttattcaaccgtgacactcttagctaggtttcttggctgatctacatcataccctctatgcaaacttgcatagtaagcaattaattgaccaggaatgatccccaataatggtgtcaataagtcgtttacggttggtaaaatgatctgatcatctgcttcagcagattcttcgctgacaatcgtcaaggcttttgccccacgcgcagtcacttcttgtaagttaccacgcgtgtgcgcaatcgttttggcatccattaagaatgcaataacgggtgtcccctcttcaatcaaagcgatggtgccatgttttaattcgccggctgcaaatccttcagcttggatgtatgaaatttcttttaacttcaaagcagcttctaaactcaaggcgtaatcttcaccacgaccaatataaaaggtattgcgtgttgtttgtaagtaatcagtcgtcaaggtttcaatctgttctttttcgctcaataaagtttccatgccagtagcgactaagcctaattcatgatgtacatcgaattgttctgctagcaccagttgattgtggcgtccaagcgcaacagccaagaataattcaactgcaatttgtgcagtgtaggctttcgttgaagcaaccgcaatttctgggcctgcatgcaataataatgtgtaatcagcttcccgtgaaagtgttgacccttggctgttagtgatggtcaagcttggataatgtaaggcattagtttgtaccaacacttggcgactatcagcagtttcgccactttgtgttaaaaagataaagaatggcttttcagataatagcggcatgtgatagccgaattcactagcaacatgtacttcgacaggcttgtgcgttaatgtttcaaacaaggtcttcccgattaaaccggcatgataacttgtcccagccgccacgatatagaggcaatctgcatcattcattgcactgagtaacactgagtcgattttaagctctccatcagcagctacgtattcgttcaataaacgccgcataacagctggttgttcgtcgatttcttttaacatgtagtgggggtatgtgcccttgcccgctgcatcagcatccatttcaacatgatagctttcacggtgaataaaagtgccgtctaaatcttcaatttgaacactttgtttcgtgagtgtcaccatttcacgatcatggatttcaataaaatcttttgtttcattcaacatcgctaatgcatccgagcacacaacgttaaagccatcacctacaccgattaacaatggcgatttattcttagcaacgtataaggtgtcaggatcatcacgatcgaccatgacaaatgcgtatgagccttcaatcaacgttaaagccttccggaaggcttccttagctgataattgttctgtcttagcaaggtaagcaatcaactgaacagcgacttccgtatcggtttgactgacaaaatggacatcctccaagtatgtttcttttaaagctaaatagttagttaacacgccgttgtgaaccaagtaaaaacgaccatcttcagaaacatgcggatgcgcattatcacgactcgcaacaccatgcgttgcccaacgcgtatgaccaacaccgattgttccttgtacttcaggcccaaccgctgcttctagaacgctaattttaccgggttctttaactaagtagtcctgcccagtttcgctgttcacgtaaatgcccgctgaatcgtaaccacgatacgccaacttctctaatccgtttaataaaatttcagttgtcttttcattgccaattacgcctacgattccacacattataaaaatcctcttttcaactttggtttaatattctttaatcaattggtacaacacttaaatataatagcaccaacgattttaatgtcaacatttttattggtatatataaatttataattttggtatagtccaaatattttccgctatctagcgcttttatgctatactaagaccagtcaattttagaaaaggagtttctgtaatgaaaaagagcatcttgttaattcgaagtatttctcttcttggcctattagtcggactgagctttatcgtcgttgcacctaaaacaatcgccttacatattgccgccaataacattgtcgattcaaccggtagtaaatacatgctactattagaacccgctttattaatcatcgtgaatgaagtcagtgttttcaatctcaaacgttaccgcaaaaattatcatttgactgatgcacctatcatacttgtcaaagaatggtatctgatatccgctgctgttgtcttattggttgtctttggttttctgatgtacgaacaagtcacattgcgttagaagaatgggctcttaaataaaattgcaccaaaaaaacccgtcaacacaatgttgacgggcttttttagtttgattcaagtgagaacgtgcttttcaagctagtgctcaaaagttgaccaacttgaacgcgcttctcgagtagtcatttccggtgaactgcaaaatggggattatggcaagaaacaccataacccccattttactgttaatcctcaaagcctaaccaactcgcgtcagcactccctttaattatgcgccaatttcagctttaacaaccgctgcgatttgatcagcatattgatttactttttcttctgttgcagcttcacacattactcgtagcaatggttctgtcccacttggacgaaccaagacgcggccatcaccattcatttctttttcaacggtatcaatggcagcttggatcttgtcatttgttaaccaagcatccttgtccttaactgttaagttaacgagtttttgtgggtaagtttgaacaggggctgctaattcagataacttcttaccagtttgtttcatgacgtttaagagttgaatcccggttaacatcccatcacctgtattgtggtaatcaaagatgatgatgtgtcctgattgttcgccaccaaggttatagcctttttcacgcatttcttcaacgacgtgacgatccccaacgtctgtttggactgattgcatgttgttggcttcaatcgctttatacaagccgatattactcataacagttgtgacaatcgtatcttgttttaaacgacccttatcagataaatattgaccgagaatgaacataatcttgtccccatcaataatattacctaattcgtcaactgcgatacaccgatccccgtcaccatcaaatgctagtccaacttgtgcgcctgtttcaagcactcttttagcaacattttctgggtgtgttgaaccgacaccatcgttgatattcaaaccatctggatgggttgccgttgttgtaaattctgtttctagatcagcaaatacgcggctaattaaaccactggttgaaccgtttgcgccatccaatgccactttaatcccagctaaatcatcaggaatcgtgtgttctaagaattgggtatacttcaaagcaccttctggatattcttccaccgtccccagaccagcgccttctggacgtggtaaagtatcttcttcggcatcaataattgcttcaatttcttcttcagttgcgtctggtaatttgtaaccatctgcgccgaagaatttaatcccattatagatagcggggttatgtgaggctgaaatcataatgccggcacttgcttcttgaaccttaattaaataggcaaccgcaggtgttgtcaccacgcctaatgataagacttcaatcccaactgataataagccggaaatcaaagattgttctaacatttggcctgaaatacgtgtgtcacgagccaccaaaacctttggccgttgatccttatcagcgtgcttggtcaaaacgtaaccacccgcacgtcctaatttaaaagccatttctgggcttaattctaagttggcaacgccacgtacaccatcagttccaaaatactttgtcatatttaattatctccattcatcctgctaaaatctttagcgttgattattgatttacattggtatttgctttactaccttcacttgagcttgattgactacttgattggctgttacttgaacttgactcaacgggcgcactacttgatgtttgtgccgtactttcagacggcgcttcaacagtattagtagcactcgtattggtcgtatctggagtcaccgtaattgtcaccttaatggcacttggcgtactctcataaatgttgtctggtaaagccactttaaccgtctttgaagttgaactcgtgattgacgataaatcgacactcactggtaacgacgtcaacttggctaaagctgtttgacgaccatacacggtcactgaatcagttgttgatgacagactgtagctgtagccacttttttcaccggtcttttccaaactaatcgggagtgttttcttactcatttgaaccaatatcttaacgttaacggtttgtggtgaaattaaaacatttaacgctttcccattgcgatcaacagcttgcaacaagacttcttcattgatgtcttttttggtgccttcatcgggatcaacagtggctactacttgcgacacagcattcactgctgattttgcaccactgacttcaaccacgtcttgacttagttttggatttcctagactatacccggccgctaagttttctttcttaacattgacctgcacagggaattgctttgtcactttgtgctcaatgtggaccttaatttctttaggttcaatcgtgactttgatatctttattaatccccgtctgttttaacttgacggtgtgatcaccaggacccagcttcgttaaatcgccaatcacgcggaaatttaatgtgttaactgctgatgtgactagcgcattcggcccggataatttcactttgaccttttgtggatagccggtaatgaaataccgaccagtatccgcattaatctggagcggcacttttacggtttccgtgcgggttgctagcatctgtgtatcattgttattcgtctggcgcgtcgtgttaatttcatccaaattgacataaccaaacagtaacaacgctagaaataacgctaaaattcgatagagccatgggccttcaacaaactttttcatcatttctggcctccttttttgaagccatcaacaaattcttgtaagagactcgttttgttttcctcttgggtaatcaaatgcgagttgaagtacttcatataatcatcacggcttaaatcacgcattaactcgttattgcgcgttaatgtgacaccaccggtttcttcagaaacaacaatcgtcaaagcatccgttacttcactaatcccaacggctgcccgatgtctggtccctaattctttgggaattaaattactctctgaaagtggtaggtaagcggccgcaacggcaatcttatcatcgcgaattatgaccgccccatcatgcaatggtgtattcgggataaagatgttaattaataactcccccgtcacatccgcatccaaatcaatcccagtttcgatataatcttccaaaccggtattcatttgaattgtaatcagcgccccgatacgccgtttcgacatatactgaatcgacttatcgagggctttaattaaattattttcttgttcaattttgggattaacgccgcgtcgtagtagcgatccacgtccgatatgttccaaaccacgtctaatttcgggttgaaaaataacgatcaacgcaatcacaatccagctgataaattgatccataatgtacgaaacagttcgtagaccaatgtaccaactgataaccttaatcagcgcaatgactataatacctttaaacaattggacggctttggtaccgcgaatcaacatgattaatttatacacaaaataccagacaacgatgatgtctagcacatttgcgagcatccgccacgttaataactgtgaccattcaaatgacataggtaacctccatccaaaaaaattctgtatctattataccatgaaccatttcaatctgctcattgtacttttaatgttgcattttaaactctaaaaataaatcattataacggccaaccgcagttggtgataaatcactataaacttgcaagcgatcgatcaccttttgacttggataatagcctgggttattccgtgttgctgctggcaagagtgctttggccggtatattgggcgttgaataaccaatatattcagcattttgagccgcgtttttgggctctaacataaagtttaagaaggcataggccgccttttcatgttttgccgtcttgggaatcactagattatcaaaccatagattgctgccctcttctggaattacatagtgcaaatggggattattatccaacatctcggcagcttcaccggaccaagtcacagcaacactcgcttcattttgaaccatatacatcttaatttcgtcagctacaatcgctttgacatttggtgccatctgatcaagcttgtccttagccgcctttaaaaccgccggattcgtgctattgactgactggccattttcgatcaagcccacggccatcatatcccgagcactatcgactaccataatttggccgcgataatctggtgaccatagatctgaccaatgtgtcagtggttttttaaccaattgatcgttgtagataatcccgagtgtgccccagaaataaggcaatgaatacttattcccaggatcaaatgattgattcaaaaaatccttgccaatattttgatagccggttaagcgacgatgatcaatcggtttaagtaagtgtgctttgcgcatcttttcaatcatgtactcacttggcaccgctaaatcgtaagcagtcccaccctgcttaatcttcgtgtacatcgcttcgttgctatcaaacgtctcaaccgaaacgtgataaccagtttgcttttcaaactttttaataagtgctgggtcgatataatcgccccagttatataatgttaatgtattatttttcgtataaccttgtgatttttgtaattcaaccgtcccaaaccaaagggctgcacagaccactaaaatcgctaaagtgatgcgtcctaatttattcattttaagcccccgctttccgtttacgccgtgctttttgggcttggcttctttgattcaataaatagtagccggccacaaggattaaggagaagacaaacatcaaggcagataatgcgttgatttctagactaattccttgacgcgctctggagtaaatttcaacggagagcgtttcaaacccgttcccagtgacaaagaaggtcacggcaaaatcatctagcgaataggtgaacgccatgaaaaagcctgcaaaaatgccggaactaatgtacggtaaaataactttactcaggacttgccagtcagtcgcacctaaatcacgtgccgcatcaactaatgctggccgcatttcatttaacttcggcaaaaccatcaagacaacaatcggaattgaaaaagcgatatggctcagtaaaactgaaccaaagcccaaaccaaaacctaagaacgtgaagaaaattaaaaaacttgccccgataatgacatcgggtgaaaccattaaaatattgttcagcgataaaatcatattgcgcacacgccgttgcttcgttgaataaatccctaacgccccaaacgtccccacaatcgtcgcacataaagatgatagaatcgcgattaataacgtttgtaacacaatttcaatcatccgagtatcttcaaacaaggcctgataatttgcccaggtaaatgccttgaagccattcatattatccccactgctaaatgaatagaaaatcaaatagaaaatcggtgcgtacaataagacaaagataagcactaaccaaacgttttgccatttcatttttttcatttgttagtcaccttcttctttgctttttgctccccggttaccagcatgattaagcccatggcgacaattaagaccaccccgatggtcgagcccattccccagttcattgttgtgaggaagtgttcttcaatcgcagtccccagcgtaatcacgcggttacccccgattagacgcgtcaacatgaataaggataacgatggaataaagatggcctgtatcccggctttaaccccagccattgttaacggtaagatgactttcgtaaaggtttgccaattacttgcgccaagatcacgacttgcattgaccaatgatggattcaattcttctaaactattaaatatcggcaaaatcataaacggaatttcaatataggtcgccaccactaagaaactgaaattcgtaaataaaatctgttgtggcccaatcccgaaccaccccaaaaaatgattaatggcaccatcttgactaaaaatcccgataaacgcataagctttcagtaataagttaatccatgtcggtaaaataattaataatagccaaagttgtttatgtttcgtttgatgaagccaatacgccgtcggataactgattaatagcgtaatcagcgtaattaaaaaggcgtaccataacgaatttaatgtcatcttcaagtaagtgcctgactggaaataggtcgtgtagttgaccaatgtcgcatgcccattgatatcaaagaaggactggtacacaatcaatgcgactggtgcgaggacgaacaaaattagccagagggcatatggtaagtaatataaccattgttttttacgcaattgccttagtcctcctcttcgtaactttcaagtcgtgcatcgaaatcttcttctgattccccaaaacgcatgatgtgcacgtcttctggttcaaagaataagccgactcgttgaccatctttagctgggttagttgaatgaatcaaccaccggttttgatctgcatcataggccgtaatttcataatagtcaccacgaaatagctgcgtatcaaccgttaccactaattggccttggtcaacggcaacaatgtctagatcttcaggacgaagcaccacttcaactgcttcgttgacccgcatcccggcatcggcacattcgaactgcttgccgaccatttcaacttgataatcagcaaccattttacctggcagaatgttactttccccgataaaatcggctacgaaatggttgatcggttcgtcataaatgtcgacaggtgtcccactttgcaacacgcgcccttcgttcataacaaaaatttcatcactcatcgctaaggcttcttcttgatcatgcgttacaaataagaacgtaatccctaatcgttgttgtaaatcgcgtagttcatattgcatatcttttcgtaatttcatatcgagtgctgatagaggttcatctagtagcaagacttttggttcattggccaaagcgcgcgcaatcgctactcgttgttgttgcccacctgataactcactaatttcgcgattctcatatccggcaaggcgcaccaatttaagggcttcaatcactttttctttaatcgctgcttttttaactttacgtagatttaacccaaatgcaacattctcaaagacatttagatggggaaacaaggcataatcttgaaaaaccgtattgacttggcgcttattggccggtaaatcgttcatcttctgcccttcaaataaaacatccccggcagacgcattggtaaatccggcgataattcttaaaatagttgtcttaccacagccagacggcccaagtaaggtataaaacttacctttttccaacgcaatgtcgatgccctttaaaatttggacatcgtcgtattctttaatgacatttttaaattccaccattggttgttgcatcttcttcttcgtcccctttatctttagcactctcagactcgttattagttgactaatatcctattaattataccgtttccgagacgcaatgccaattcaaagcgaacattgttgtataatggagttaaataattatttagaaatgaggttgtaatcatatggtcgcctatcaagcactcgttttagaacaaaccgatactactgtcagtgccacttatcaaactaagttaacgccagacctcgctaaagacggggtgttagtcaaagtcgcctattctgatattaactacaaagaccggctcgctatgaatcctaaaagtggcgtcttacgtcactaccccatgacacctggcgttgattttgctggcgaagttgtcgaatcggataatccgttctttgaagcgggcgatcaggtgttatgtacgggttatgaaactggcattacaatcgctgggggctacgctgaatatgtcaaagtccctagtgaatggctctttaagttgcccgaaaatcttagtcttgctgaaacgatgcagtttgggacggccggtttcaccgccgcaattgcgctcagcaaattattacgccaagcctttacagccgatcatgactccccactcttaattacgggtgccactggcggagtcggaagtttcgcacttaccatcctcgcgcagcttggcttcacaaatctaacggcaactacgcgtgacttgcaacaaaccgattatttattgcaccttggtgcgacccatgttattaatacagctgacctaactgctggtccgcttaaagcgctcagccatcagacattcaccggggttattgatacgcttggcggtcctgttttagcccacatcttaccgcaagtttgtgccggcggattcgtagcaacttgtggcaatgccgctggtgcaaccctagaaacaacagtgatgccgtttattctacgtgggattaccttagccggaattgattcagtctattacccacgcaaagaccgtaaagaactctggcaattactcgccacgacgtttaaaccggaaatttggccaacagttaacttggtcgccttttctgatttagcccgagaacttagccagaagacgcataaaactgggcgcgtactggtcgccttttaacccaaaataaaaagccccgctaaatgatttggcggggctttttatcgtctaacgacgttcaaattgatacttaggttcttcaagctctggatcgtaatcaacctgtaaatcataatcggcaaaaaaccattcgtccgattgactcgcaaaataggtgataccatctttaacaaccgaaccaattggctgctcaacagtagcgcgttccatgcccaatgaaaagccatcatgcacggccgtttgaccatacactttgccaaaaaagcggactgcatcccccgattgtaaggctaattcgtcgcgaaaccattgacttgctgcatctgacacctgaatttgcatgttgaactcctcctgattaatcgactagttggttcttaatcgcataaattgccgcttgggtgcgatcatccacttgtaacttcgccaaaatatttgaaacgtgcgtcttgaccgtttttaacgtaatgaataattcatccgcaatctcttgattactacggcctttggcaatcaagcctaagacttcacgttcgcgattagttaagtcttcatatagcttaggttcagccggatgtgttaagcgattcatcatcttattcgtcacttctggctctaaaaccgattgtccttgcgccgttttacgaatcgtattggcaatttcctcggctgtagaagtttttaatatgtaactggccgcaccggcttcaatcgccggataaactttctcatcatcgataaaactcgttaagataatgattttggcttcaggccacgcctttaaaatcgttttggtggcctcaatgccatccatctcaggcatcactaagtccattaaaatcgcatcaggacgtaatgcaagcgccttttcgacaccttctttaccattgacggcttgatcgacgacatgaatatcgtcttgaacccctaaatacgttgagatgcctaatcgcaccatttcatggtcgtctactatcaatacattaatcacttaattggtctcctttaatagtggcactcgaatttcaacactcgttccctggttaggcaaactaataatttttgccgtccctccaacactatgggcccgttcgacaatgttgtttaacccataactgccggctttttgctcagcattcgtatcaaacccggtcccgtcatcaattacctttagtaaaacactctgaccgagttgtttcaagtatacttcaatctcttgggccttcgcatgccgtagtgtgtttgacagcaactcttggacaattctaaataaattatcttcgatgccacttggtaacgttatgctatcaatgtcccatgtaatctgaatcgcaattttggtcttcaattcgttcaataactgaatgatcccatcgcgtaaactcttgccttccaaattaactggtcgtagatgcaagagtaaggcccgcatttctgattgagcctcatttaacacccgttcaactgtcgttaaggactgcaacatctgcgcgttatcagcttgtttttgcgcaacttcactgagtgccgacaacatcatcgtcgccgcaaatagttgctgactcactgaatcatgtaactcgcgtgctaaacgatgccgttcttgcgctagaatttcttccttggtttcaccagcaatcacggtcggccgatcactataactttgaatctcttgttgtaagcgtatcattttttggcgtaattgttcaactgtttgctcgattgacatcgcgtagtcattggtttcgctctgtctaatctgaaaaacaggcgattcatactgtccagaaagtaaaaattgtaactggctttcagtatgggataattgcttacgtacgacaagatagacgattgcggtaactaaaaagcctactgccattgcggccaccacaatataaacaatcagtggtacatagaataattgcttcgtggccaaactaatcagccattgttcctgatgcgtactgtagaaatacgcaaaaaataacgccactgaaaacagaagcgtcaacaaactcgtgctgatccatataaagctccgcgttaacttgctcatactaagatcacctcaagatcaccaatcattacgttggtaatgattttaaggtggcgactttcttcatcatagtttgtactatacaactgaatcgactcatttttcaaattatagtgctgattgtcgattgtcacactccctaacattgcagagtgatcaagatagacaccggtcccgacaggcactaaaatccgtgtctttccaaaccccttacggatgacaatatggttgtcattcttgggtaaaatggtgctccctaaatcgataattgtatcaccggcagcgaccgcgaagttaatatcatcccattcaaaaatgttattgccaattgtctgatgaccaaaccaactatgccgcttgactgttgtctttttcgcggtgggttccgtcgtattaacgggaataaattttttcttgcgccaaggggcattatcaaacaactgattcatattgcggctgctaaactgtcccattcggctatgatttaaggctaaaaagacgaccgcaacaataatcattaaccataacgagaaattaattaacagtggtaccgtaacagctacgcaaccgaccatcgttaacaaagtcgtccagacaccgattttacctttactacgacgtttgttggcccagactaagagtaaaatacctgcaatgatgaacactaaatttgcgggtatcgtaatcatctgccaaatgaacgtcccgaagataatcgcttctattattaaaaaaacgcgccagataaacggcatatttacggtcccctttcaactgattaatattattatacaagcaaaccagataaacaccaatccgtctcaaggctgattaacgaattaacggcaaaataaaaaagccacgggattgatttccgtggcttttttgaaacgtgctttttggctgcaacaacttctgcttaatctaaaattggcagtcatcctaaaatctggatgactgccaattttgtattaatgctcagttgctaaccgcacccaaaagcactctattcttaaacgtgctttttcgaacaaccttttccggttaactacaaaacgggcgtcatggtcaaaattcgaccataacacccgtttttacgttaatcctcaaagactaacccgttcgaaacgcactttatttaacttctgtaattgtgacgtgcatgtcgccgcctggtgtttgcacagctactttatcaccaacgtgtttgccaagtaatgcttgggcaattggtgaatcatttgaaattttaccactgaatgggtctgattctgcagcaccaacgatttggtaagtttcttcttcaccatcttcgtcgtctgtaaagctaactgttttaccaacagcaatttcatcagctgcgatgctatcaacatcgattacttctgcaaagcgtaacatattctcaacttctgcgatgcgtgtttccaatgagctttgttcatctttagctgattcatattcagagttttctgataaatcaccaaagctccgtgcaattttaatccggtcaatgacttctggtcgttttaccattttgagtgtttctagttcttcggctaacttttctttgccttctgcagtcattggataagttttttgtaccattttatccacctctttattttaattaataatactgactatcttaattactgtgtacgtccttgtcaaatctcaatctttaatcggcatttaggattgattgaatctttgttacaagtaaatcaatggccacgcgattattgccaccttctgggacaattaaatcagcgtaacgcttggttggttcaatgaattcatggaacatgggttttaccgtcttaagatattggccaaccacatcatcaaacgttcgaccacggctttccatatcgcgatgcatccgtcttaataaccgaatatcatcatcagtatccacataaaccttaatatccatcaaatcccgtaaccgggcatcagccaatacaagaatcccctccaagataataacatcttgcggttcaacccgttgaatttcctccgtccgattatgaattttataatcatagaccggttgttcaatggcttgatgattttttaacattgatgcttgttcgattaataaatcgttgtcaaaagcatctggatgatcataattcgtttgttggcgttgttcaaacggaacatcttgccgtttgtaatacgcatcttgtggtaataacatcactgagtgattcgcaaatttttgggcgatagcctggctaacggttgttttcccgctaccggacccgcctgtaacgccgataatgatgggtgcttttttttgactggacatgggacgctccttttattctcaacttctttttgggcaaacagaagtcgacctccaatggcggtcgacttcgataatcctaaatgaacctaatcttcaatcgaatctgttgtatcgttatgttgttcgaaggttcttgagtaatatactttacctgtcttcaagttagcaacaaagtagagataattttgatcacgatcagctggattcaagacggctgtgacagactgtaaactaggtgagttaaacggtcccgggccataacctttattgatatataagttatatggtgaatcgactttagtatctttgttataaaggtgtgtcttgtgggtatttaatgcatacattactgaaatatcagattgaattggcatatcgatgtctaaacggttaaagaagacaccggcaatcttttggcgatcgacggctgtgaccccttcacgttcaaccaatgaagctagcgttaacgtttgttgaacggttaacttcttatccttaatggttgcataataaggttgcatcttttgatccatcgttgaaaccatttcggtgataatttcttttaatgtactatctttataaacttcgtaagtggctgggaaaaggtacccttctaagtgatagcggacatccttttgagccattgttgatgacaataatgcagggtatttcttctctaaacttgctaagaattgcttatcattcgcttgtttgatgaaggctgctttagagaattttgtttgtttaccaacttcggccgcaatttcttctaaagtgaccccttctttaactaacaatttgcccttcacatcgcgaggacgggctggtgtgccttctttttgtaagttagagatgatcttatctaaccccattgattgtttcaacacatgataaccggcttggaaatccgagaaattatgagtcttcacataataattaaagactggcgcgcttcgaattaattttttatcctgcaaaatagcagcgatttgtttattcgttgagccgttgggaatgcgcacggtaatttcttgttttgctttggtgtcgtatggtttaagagatgcttgtacgtagcgatatcccatgaatccaataatgacaacaagcgctaatagaataccgataatccaatagacaattttatttgctgcttttttttctgcacggcgttcttcgtacaatgattgtgccgctttttcttgatttactggctccttttgatcaactttcttcaaaggatgacctcctaattgctcttttaaatacaatccttaaaacattataccaaattattcaaaaattgcattaaagattcgagattaacggattttggcatcaaaagtagcaactaattcagcgactactttttcaaaagcagcgttaacttcttcttctgttaaagtagctgcctcattgaggtacgttaaggtgtaagccattgacttctcaccagcctcaatatgactccctgcgtaaacatcgaaaagttcaactgaaactaagtgggcgccaccctttgctttgatggcttcaacaattgcggcatttgaaacttgatcagacacctgaattgcaatatcccgcgttacttcagggaatttaggtgctggtttagcaatcactgtttgggttggcaaggctaggatttgtgctaaatctaattggaaaacataagtttcttttaaatgattagctttcgcaactgctggatgaatttgaccaacaaatccaaccagttgttcaccaacgtaaatggctgccgttcggccaggatgcatttctggataagcttgtgttggttgataactgattgcatccgctaagttgtaacttgccatcaacatttcaaccacacctttgattgtgtagaaatcaactggtgctgcggcagcttgccaagtcttcatttggcgattgccactcattaagccagccacatattcaatttctgttggccgaacttggtcgtctgcttgttttaaaaatacccgtccttgttcgtatagtgcaagatcagtttgtttacgtgccacattgtaagcagcatcgtccaataaaccagtaatcaagttcatgcgtaagtgcgcatgatcttgcgtcattggccaatcaagtgctgtcagcgccgaatcaacaagcgtaaattgacgcgctttttcaggggtcgttaatgcataactaattgcttgcgttaaaccagcaccttcaagtgtatgccgggttttacggagtgccttttgttcagtcgttaatgccccggttgtcatatcgccagttggcaatgtgcttggtaagttatcgtaaccgtataaacgagcgacttcttcaatgatatccgcttggatttcaatatcccaacgccgtggtggaatcgttactgttaaatgattatcagtattgaccacactaaaaccaaatcgttctaataattcaataattgtttgcgttgcaatctctgtgcctaagacgcgattaatccggtcagcttcgatttcaatcactttgtcagttggcactaagttagttgggctaactgtaccagcagtcacttgcccattaccaaggtctgccatcatcatagcagcagcatctaaggctgtttgaacatcagcaacattcacgcctttttcaaaccgtgatgacgcatctgaacgcaagttatggcgttgagccgttttacgaactgcagttggtgcaaaaactgcggcttcgataatcacatttttcgtatcagcagtaatttgtgagttcaaaccacccatgacccctgctagcgcaattggtcgatgaccatctgtaatgacgatatcttcatttgttaagtcatgtttgccttcatcaagggtcgttaatttttcgcccgtcttggctaaacgaacttcgatttgtttgtgatcacccgttagagcatccgcatcaaacgcgtgtaaaggttgcccatacgttaacatcatgtagttcgtcacatcaacaaggttattaatggggcgaatgccagcattccataaacgcgtctgtagccacattggacttggttggacggtcacgttttgcaacatacgcaagtgataacttggtgctaattgttcatcagcaacttgagcagtcaattgatcagctgtttgaacgttgctttcagtcactacgatatcttcaaaatgaggtgtcaatgattcaatggcggccacttcatgggccacaccgtggatgccaagcgcatcggctcggttagcggtgaggtcaagatcgataatgtaatcagtcatcccaagtgcttcataaacttctgtcccaggttcaattgcttctgggaagacaaagatgccatcaacatattccttaggcacaacgctatcggcaaagccaatttcttgtaagccacaaatcatccccattgaaaccacgccgcgcatcttgccttttttaatcttaacgttgtcagcaatccgagaattaggtaatgcaacgactacatattggccagcagcgacattgggtgcaccacaaacaatttggaagggttcatcttcaccaacatccacttggcaaacattcaagtgatcagaatccggatggggttcacaacttaaaatatgtcccaccacaatttttttcaagcccgcgctcttttgcgcgacatcagccacttcaatccctgttcgggtaattttttcagccaatgcctctggggcagttgttaaatctaaataatcttttaaccagttgtaagaaactttcatggtctagccctcctgtgtgaattgatttaagaatcgaacgtcatttaagtagaagttccggatatcatccacaccatatttcaacattgcaaagcgatcaaccccgagcccaaaggcgaatccaccatagacatctgagtcgacaccgccggcttttaagacgttcggatgtgtcatcccagcccctaaaacttcaatccagccagtttgcttgcagacattacagcctttaccatcacaacggaaacaagaaatatccacttcaacagatggttccgtgaatggaaagtaacttggccggaaacgtaaatcacggtcttcaccaaaaatatggtgaatcgtgtattctaaggttccctttaagtctgccattgtaatgtttttatcaatcacttggccttccatttgatagaattgatgcgaatgcgttgcatcatctgtatcacggcggtaaacacggccgggactaatcatcttaatgggaccattagcaaagtcatggttttccaagtcacgtgcttcattgggtgacatgtgcgtgcgcatcaataaatcattagtaatatagaacgtatcttgcatatcacgggctggatgattagctggcatgtttaacatttcaaagttatgtttttcatcttccacttcatagccagcaacgacttgataacccattccaataaataaatcttctaaatcatcaatcacttgagttaagacatgcggggtcccttttttgaccggttggccaggtaatgtaacatctaatgtttcgtgagccagttgggctgctgccttcttggcttctaattctgccttccgggtttcgattgcttctgccaaatcactcttgatttcattagcaaatgcccccaccttaggtcgttcttcattacttaaatcacgcatgccgcgtaaaacttctgtaatcggtccttttttaccgagcacttccactcgaatttgatttaacgcctctaaatcaacaactctttgaatttcttgcagactcttttgctgtaagttttctaattgttccttcaatgacattgcaattcctccttatttttttcaacaaaaaaagcccgtccctcaaaaagggacgaagcttcgcggtaccaccctagtttacgaccattccagtcatacactcaagtttgcgctaacgggcaataccggaccaatggtcaactcagaaagtgaatttcacctaaacttagttgaataacttgcagtcaactgattattctccctgaaaactaatgattaggttactctttttcgtctttgtttaataattgtattttaacgtaaataaccgcaattagcaactaggcttctgtcgcataccagtcgtttgaccaatcgtgaatagcagccattactggcgctaattcttcacctttagtggtcaatcgatattcaatcaacgcagaatcatcactggtaatccgcgcaacaatgccttcttgttctagttccttcaatcgttcaaccaatacgcgatcactgcacttaggcacactgtgcactaagtttttaaaccgttgtgccccgttttctaataggacatcgataatcaggccgttccacttcttacctaaaattgaaaaagtcttttcaaatttaggacacagttggaaggcctcttgacagtcagcatttgcgttttcttttacaatcaccattattttcacctcacacttattaataagaagtgtactgaaaaaggttgcaaaaagcaacctatcagcttgaagcatctttacttgttaattgccggtgtttggcggagaactttttgtttaaatttcgtccacattggtgtacaaaattccgtcacagcacaataatcatcgactatcgatacaatgtaactttccttatatttcggacgactaacagttgcgccccacatgtgtttaacgatgatgtctttttctttaggtgagagttctgttaatttttcggcattccgaagcgcaatgcgcggatggatataagcatgtgtgcctaaatcgaacttcgtatcacgccagtcataatagaataaatcatgtaataagcccgcgcgtgcaattgctcgcgtatcaagatgccacttcttggcaagttcataactgcgataagagacgcttagcgaatgttccaaacgatctgaatgatgatgttgcgtatagttcgctaatttttggacttcatctttagctaataaatcggcaattagagccatgtaatccgcgtcatcgtaccattttgctgttgaattcattcaaagactcctgacattttttaaattcaaattctgccacaaggataacagcttttcgttcaaaaaagaagttaaacgccttaaaaagttacgtttgttagaaaaaattaagaattaagcttcaatcaacttgaacattaaaatcccagctgcgactgccacgtttaatgattcagcattccctggaattgggatgtaaatattttgcgttgtggctgctaagacgttttcattcacgccgttcccttcattacctagaatcaaggccatgtcatttgctttaggcacatcttgataactgatggcctctggatttaattccgttccataaactgggacgtcttgcgaattgaatttcttcatccagtccatcaagttaccttgataaattggtaaatggaagtgactgccttgcattgaccgcaagagttttggattatacaagtcaacactgccattgcctaaaacaacgccggcaaagtctgctgcgtcggctgtccgaatcattgtgccgatattaccaggatcttgaacagcatctaataataagtaacgacccgttaatttttctggtaccggtgtttcagacatttcaacaacggcaaaaatgccttggggtgctttagtttcactcaagtgttgcgccacttctggtgcaatttcaaaagtttcatcgtaaagaccgcgcaatgcgcgttcgtccacatatttttcagtggcgaaaacttggcggatgacggccttattttggattgcttcttggactaaatgccagccctctagtagatacgtattttctttacgttggtttttcttaacggttaatttcttagccgccttaattttagtgttttgattcgattgaatgtattccatgttgtgctccagtctatttagtactttctattatacgcgacttagtgggtaaattctatcaagggtcgctttttaatcgccaaatcgggttgaacagcttacaatgaagaggaggtgatgacaatgcaaaatgcaattcaacttgaagtctatggccgcgtgcaaggcgtcggatttcgctggatgaccaaattggtcgccgataaactccatatcacaggtaccgttgccaatcgtgacgacggctccgttaaaattattgcgatgggcccagcagacgcactcgaaaaatttatcggtgctgtcaaagcttctcccacccctagtgggcgcgtcgaccgtgtcattcaaacaccgctcgaaaatgtgtcagcgtgtcataaattttcggttgtcagttgaaaaacctagccccttcaagtatagttacacttgttgaaacttatcttgaaagggctaaatttatgaaaaattctaaacgcttcgcgacactcgcgatgcttacaatgaccgttacattctttctcgctggctgtgttccacaaaaaatgagcagccatcccaaagtcccaaccggcttaatctatggttcatcctataaatacatcgccgtgccgctccaacatattatggaacgcattgctgatgttttcggtggcatcaatggttacggctgggcaattatcatcatcacattcgttgtgcggatgattttactcccattaatgttgaaccaatcgaataagatgacggcccaacaagaaaagacccgtcgcttgaaaccgcaattagatattatccaagaacaacaaaaagcggcaacaacccctgaagaaaaggctgaacttagccagttgatgatgaaggtttataaggaaaatgattcaagcatgatgccaagtcttggttgtttgaccttattaattcaattaccaatcttctctggtttgtatcaagccatccaatactcacctgaaatttcaagtagccacttctttgggatcggtcttgggagcccaaacattatcattactgtgattgcgaccctcttatatgtcggtcaaagtgcactttcattagtcgggatgcctgctgaacaaaagaaacaaatgcaaacaaccgtcctaatgagtcctgcgattacattcttcatttcgttatttgcaccagccggtttagcactttatttcttagccggtgggattatcatggtgattcaacaattaatcacgacattcatcatcatgcctcgtgttaaaaaacggatcgatcaagaaattaaggaaaaaccaatcgtcacggttgtcacaaaagaaatgttcactcaaaaagcagcagtcaaaccagctgccgacgtcacagaaacaccaacagaaacaagcaacccaactgtcgctacacctaaagtagctggcaaacgcaactcaggtaagcaacggcataagccacaagcttaaccaacaaaaaaaagcggtgcgcctcaatcaattagatgattgaagcgcaccgcttttttaatccgtattaactggttcttctgattttggttctacttcacgaatcagtggtaactcaactctaaaaacagaaccgtagccaacgctactttctagcgacacattcccgtcatagccttcaacgagttgttgggcaattgctaatcccaatccattgccacctttttcccgactccgtgctttgtcaacgcgatagaaccggtgaaagactttcttcttatcttcttccgaaataccttcaccaaagtcttgcacggccacttgcgcataccgctcatcactagcgacggcaatatgaacttctttacgtatcgttgaatatttaatcgcattatccaacagaataatcataatttgttctaagtgatttcgattaacatgcactagcgctggttggtgcaaatcattgtcgagcataaaattaaattctggatataacatctcgaagttatggtaattctgaagaacaacttccccgacatcggtcacttcagtcgttccttcagtcacgactttatctgcccgtgttaaatcaagcatttcttgaattaaatttttcatccgcaagatttcttgtaacgaagccgctaaagattcttccagtacctctggatcatctttcccccatcgattgagcagttgtagatgcccttcaataatcgcaactggtgtccgcaactcatgcgaaacatcactgacgaactggtcttgctgttcgaaataatgctgaattcgattcaacataccattaaacgcactgaccagatcagataattcatcttgactatgcccagtctcaggaattcggacatctgaattaggctctgaattaatggcttctatcgtttttttcataacttcgattggtcgcaagaattggttggctaataaatagccaatcaatgcactaaataacatagcaaaaaagacaaccacaactaacacaattcttaattcagtcatagcgtggttataatcacggacgttattgaccacctctacataaccaattacacggttttgacttgtcttaatcggactaatgccaatcagccgcatcttaccaaaaatagctttgcgctttaatgtatccgtatcgccttttggaaacggaccaatcgccccgcgcgatgcaaacaaacccttcttgtttgcatcataaatcttaactgtaacatcctgttgtgctaaccgcgttaaaaccgcatcttgatagatggctttagggctgtgacggttcggatccaattgattggtgacaaagccttctgtaagatgtggcccattgctggacaatctcgcttgtacgacggtcaccgtatcgtgcacattatcgacttctctgtgtagcaagatattagagatactactaaagatcacaattgaaaaaatcgcaaaggtgataaaaatggccaacccaaccgcagctgcccatttcacctttaacgatattttacgacccttatttgttgttgatgctaccgtttcgtcctgcatcacgagcgcatcacataacccattccacgaaccgtttgaatgtaactttgttcgccagaacgatcaattttatttcgtaagtaacggatataaacatcgacaacattggtttcaacatccgaatcgtaaccccaaactttgctgagtaagacatcgcgtgccaaaacaacgttgacgttttccatcaatgttaataataattcatattcacgtttcgttagttcaatcacatcatcaccacgccgaacaactcggttttctttttcaaccgttaaatcacggtaagtaaccgtcgtttgtttagcagcgttatgttcgccttcgatatcaattcgccgtagcaatgcccgtaaacgcgctaataattcttcaatggcaaaaggcttaacgatataatcgtctgcgccatgatctaacccagaaacacggtcaatcactgaatcacgagccgtcatcataatgattggcgtattcttaacttggcggacccgacggcagacttctaacccgtttaattcaggtaacatcaagtctaataaaatcgcgtcccattcttcattcaaggcagcttctaaaccagtacgcccattgaaatggacctctgtctcataaccctcatgctttaattcaagttccacaaatcgagctaaatttttctcatcttcaataatcaatatgcgactcatttagtcactccccaaaaaagaatttttaatggactctctaaattctaatcaatgataagaattctctaagaaacctcaagcgccaaaatcggcttacctttccattctagcatagttccaattaaataactaactaatctgactctcatctgatggcgatttagtaataatcgaaaaaacacctgcgccttaataatcggctcgggtgtttagagaaacgtgcttcctcgaactgtcttttccggttaaccgtaaaatgatgcttatggctaagaaccgccataagcatcatttttctgttaatccttaaagccaaaaacgttcgactcatcactctattttaaaacgcgcatcccgtcgcagccatttccgcttaatctaaaattgccattaatcctaaaaccgggattaatggcaattttttattaatgctcaatgactaaatgcaatagtcagcactcttgtactaaaacgtgctccagtagacatccgcttccggttagttgcataccgcaaacgatcggtttcaccgctcatttacgatattccactaatcctcagcgcatccccgtctacttgcgcactctattgttctttataccaagtataatggaatgtgccttcgcggtctgttctttggtatgtgtgcgcaccaaagtagtcgcgttgtgcttggattaagtttgctggtaatacttctgaacgatatgaatcaaaatatgtgatagcagctgagaaaccaggtgctggcacaccttgttggatggccattgcagctacgtcacgaacagcgccttgataattctttgtaatatctaagaagtaatcatccaacaataagttgtttaaatcagcttttttatcaaaggcatccgtaatcttttgtaagaaacgggcccgaatgatacagccttcacgccagatcttagcgatttcgccatagtttaatgaccagtcatattgatctgaagcaacccgcatttgttcaaagccttgcgcatagctcatgatcttgctgaagtacaatgcttggcgaatcttttcgattaattcttttttatcttctgttaatttagcaacggttggggctggtaaaatcttgcttgcagccacccgttcgtctttcattgctgaaatataacgtgcataaacagattctgtaatcaatgattgtggcacacccaattcaagggcgctttgtgaactccacttaccagttcctttgttaccagcagcatctaagatgacgtcgacaattggtttatccgtttctaaatcatcttttcgcgttaagatgtccgctgtgatttccattaaataactgtctaattcgccgtggttccattctttgaagacatcagcgatttcttcaacagataaaccaacaacgtttctcaataaattataactttctgagatgagttccatatcaccatattcgatcccgttgtggaccatcttaacatagtgaccagcaccgtttggcccgatgtatgtgacacatggttggccatcttcagcctttgctgacatttgttctaagattggtgcaactaattcataagcttctttttgaccgcctggcatcattgaagggccttctaatgcgcctaattcaccaccagaaacacccattccgataaagttaatgcctgacttatctagttcagcattccgacgaattgtatcgccaaagaaggtgttcccgccatcgattaaaatatcacctttatctaataaaggtaacaattcgttgatgacagcatctgtaccagcgccggctttaaccattaagatgattcgccgtggtttttctaatgattgaacaaattcttcaattgtatagcttggtaccaatttcttttcgctgtgatcttgcatcactgcttctgtcttagcacctgttcggttataaatcgcaacggtgtaaccgcgactttcaatgtttaatgctaagttcttgcccataactgccatcccgatgacaccgatttgtggttgactcatgtaaaaggcctcctaaatgatttctaaatttaagcgttgttgactatcaaaacgacaacgcgtctactgtgtttatgttagcagaattacgctttaaataaaagcattttaactgatttggtccggtccatttaacaaattgggtataaaaaaacgccaaacttagtcggcgtcattgttttgttcttctaataattgtttaagcttagcaaattcaggattgggtgccgtttcttcttcagcctgttgcttagcataggcttcttcagaaatgactgaccacgactgtccggctggcatcacatcatcttgttcttcttctggtgttaggatgtgacttggaatgtgcaagagaatgtgatcttcaacagctacctgtagctctagggcttcgccttcgattgggaacaaaatatcttcgtccgtaaatcgtcccaactgctcgtcttctggatcaacgtagatttcagtgaattcaaaatccattggcaaggctactggatctaaactccgcgttgaaggcactgttaatgtcccgaccacatgtacgcgtgcaattacagcgcgctggtcaaccgttaattcaccgtctactacaaatggtgtagcatctaggacatcagcttctcttttttgtaaactttcttttaacatcaatgtttctttaaacatcaatggatgatcacgatgttttaataatgattggactgtccattttaacaatgctcgtcatcctttctttggttaaaaatcggttggcgggcaaaattctgtgattgccagccaaactgttcttgtaatcgatcaactcgcacctctaaccccagtgggccctcttcggcacccaatttagctgagaccttactgataagtgggtgatcgagcgtttttttcaacgtgtgcaaatgcgcctggccgacttggttaaagccaagcaaatggatgggccgctgcgctaatgattgttcaatatccgtttgttgaatattcaacaggacgtataaacaaacccgttgcaagcgtgcatacgtatatcgctttgttttaagtgcctgtaacaactcggcataccgattgactgaatgaatcacctttttgaaacggtactccaagccctctgacatctgataaatctgccgaagttgggcaaggggtgtactttcaattcggtatttcaatagcggccatagttggtcccaatccagatgcgattgagtctggagcgctgttaaagtcgaatgcggcatcactggggctaactgtgcccagtcatcaccctttgttgccgcctgtcggatagcactggcactagcaaattgtcccgcgccaatcgtttgatcgccgtgttgtgcctgctcacgcttaatcgcaagcaactgcattggcacttcaagttgcgcgttggcaaccgcataactgacccctaagaggtgattgggttgatctaaatttaaatttaattctgcttgataaaactcattgagctgcgtcgcataagttttttgataatcaataaacgtctgtgacttggcctttaaagctaaaatctgttgcccgacttgctgatagtcaaacgttggatattcactgccaaacgctaaggtctgacaaccaagcgccgccaataacttgacggccccatcagcaaaacggtctgcaggttggacagcactggcaaacggcaattcaacgaccatatcagcaccattgctcaaagcaagttgtgcgcgcgtccatttgtccaaaatcgcgggttcacctctttgcacatagttaccgctcatgcagacaatcactaaatctgcgtgcgaagctgcccgcgcctgttgcaattgataccgatgtccattatgtagcggattatattccgcaataatccccgtaattctcatgcgtcctccgcctatttcactgcgctaaagaaccaacgcacactatcttcttgaacggcttcttggccaaaatcagcactgactgatacattcttgaacccagcagcttctaatgctgcaacataatctaccaccggataagttcgttcatggtgtaattcattaagttcttgataaccgtcaatctcgtcatcccagataaaaaagctgagatcatgttcaactgaatgtggtacttcacctgcgtaactcgtccacatgaaggccgtttctgccgtcttatcgttatacataaaacctgggaaaagctcatccatttgataaagtgaatgggcatcaaatagaaattgaccacctggctctaaagttcgataaacttgttcaaaaacttgttggacatgcgctaaatctggcatgtaacagatcgagtcgtcaaaacaagtgaccgcttcaaacgtcccaatttcgcctaagtcaagcatgtcgccttgtaataaaggtaactcgacctcggcttcagaagccttttcagaagcgatactcaacatctcggccgataaatctaagccgacaacctctagccctgcttgttttagcaagatggctaaatcaccagccccacaagctagttctaggactcgatgtttattttgtaacgtctgcaacgtgtaatcccgccattgaccatataatgaatggtccatcaaacggtcatagacggttgcaaagctttggtaaatcattcttcatccaaccattcggaaacatcaacaagtggtgcttgatcccaaagtttttcaaggttgtataaggcacgttcttctggcatgaaggcattgacaacgatatcgccaaagtccatcaagatccaacgtgaaccctttttaccttcgatgtgttttacgaaaacgccattttcttcttctgcgtcttcaatgacgtcaataattgcgcctaattgacgttctgacgtcccagttaacatcacgaagtaatcagctaataaactgatgccttccatgttcattgcgacgatgtcttctgctcgtttgctatcagctgcttgcacagcaatttttaaaatatctaaacttttcactaaagttctcctttatttggcttgagtcggtacccaagcattgtatgtgtcgattgttttcggataaatctgcttcttgccctgaattaaaaaggtcaatgtatttaagatttcataccgcacgccggctgctaaatcagccattgctgtctcacgagcagcttctgcgcccggaaaattgcgcccaggttcgacaaaatccgccacaaataaaatctgatcaatcaaggtcatttctggcgcaccaatcgtatgacgacgcacagcatttaaaatcgtttcatcatggatttctaaatcacgttcaatgaaataagcaccaacaacaccgtgccagatggcattaccgtaattgagtagttctggatcaaagccttgcgttttaatcgcttcaatgaacgtttcatctggtaattgcttagtatagtcatgcactaaaccagcaattgccgcgcgttcaacatctgcgccatttttttgtgctaattgaatcgcggtggcttccacacgcaaacaatgttcaaatcggctttcagataagttagcggcaactttagccactaactcagcccgtgtatacggcacgatgttttcttgataaacaaaatcactcatgatagaggccctctttttgaatgtattcaaagactgggtccggtaacaagtaccgcactgaacagccttgttgaatcttattgcgaatttgcgttgaactgacatcaattaccggtgcgtccacccataagactggatacggcgtttgttgagcataccctgttcgtttaacaccaacaaattggactaactgcactaaatcatcaattcgataccaagtaggtaagtagtcgaccatatcaccgccaatgatgaaataataatcgatttcagggtgttgttgttttaatgccacgatcgtatcgtaggtgtaactgacaccgccacgttcaatctccgttaaatcgagttcaaaatgcgaattgtcagcgatggcacgttctaccattgcaacacggtgttttgctggtaatgtttttttctcatcaacgtgcggtggattggcatctggcataaacaaaattttatcgagaccgagttggctacgaacttgttctgccatcactaaatgaccgatgtgtggcgggttaaatgtgccccccataatgccgacttgcaagcgatggccatcttctacaaccaacacgtccggttcagtcacatgatttgtctgctttagcgttgcactttgcatctgatcaccgccttattagcgtccgagcttagtaacaatcgttgaaatcttttggtatttttctttccgtgaagctttataaatcaccaatgtgcgtccaattttttgcgcaatttcgatgcgactgtcatgttgttttaagaagttggctaattcatcaacggtcacttctgttgtttgtaacaagttaatcttaacgagttctcgtttttcgatggcctcttcaatttgttcgaaataagtttggcttaagccgtttttgcctagttgaaaaagtggtttagtggtttgcgctaaaccgcgtaagtaatgtttttgtttgcctgttaacacgtgcgatacttccttccctaattaaattaatgctttccgaatcatgactgagacacctttaggcgcatatcccgcaaccacgacattttctggtaacgtaatccagcctaacccagcaaacactaaatcactcttttgctttgttgagaattcataccgttggagttctggaaaatcagctaaatcttctggatgtggtggctgtagcatgtcccctaattgcttagcgtagaattgatctgcattttcaagtttagtccggtgaatgtaaagttcattgtcaaaataaccgacaaagccatgccgtgcaccttgaatgaaatcaaaacgagctaacccacccaagaacaatgtttgttgttcatttaattggtatacttttggtttaatccgcttttgcggcgcaatcaaccgtaagtctttatcatgtaaataatgcgccatttgttgggcatgcataatccctggtgtatcaatcaatgcatgatcatcttcatacaatggaatatcgatgcgatctaaagtcgttcctgggaattgtgacgtcgtaatcacgtcgctatctaaaatcccagtttgcttgataatgcggttaatcaacgttgatttaccaacgttcgtcaccccaacaacatagacatcgcggcctttacgttcgcgttcaatcacggccaataattcatcaactgaattcccttttttagcactgaccaacatcgtttcaaccggatgtaagccatgttctttcgcttctttttgaatccaattgatcactttatttgggttaagagcagatggtaagatatcaaccttattccccactaaaatcacggggttatcgccgataaaacgatgtaaccctggaattaaactcccgttaaaatcgaagatatcgacgacgttcacgatcaacgcgtcactgtcgccaatttggttcaataaggctaagaaatcatcatcatttaatttgatatcactgatttcgttgtagtgtcgtaatctaaaacaacgttggcaatacaattgacccgtttccaagccttttttaagcgctgaattaggcgtatagccgagtgcttctttgtccgttgtttggatgcgagcgccacagccaatacaaaatagttcttcctcagtttgttgtgtttcagtcatttaaatcctcccgccaagttaaatctgcgtgtttttttagtagttgttgcataatatatttttcaaagaatcgattaatcgatgtattccaggcatcactgtcaataatgggtttgaccaatatcgtccggacgccagccacattaccggcatgcatatcggtaatcaattgatcgccgaccatcaccacttcatgtcgcgaaaggccaagctgcttcttcgctttggtaatcccagttgccaatggcttgttcgcccgagcaatgaatggtaattgcaattcactgagcgcgcgttgcacgcgatcatggttgttatttgaaacaaccatcacggtgatttcggcagcttgcatctgtgctaaccaagcttttaactgtggtgtgccatcggggttattccacgcaattaacgtattatctaaatccgttaaaacggccttaatcccttttgccttaagttgttctggtgttaagtcgtagatggcattgaccatccaagttggcttgaaattctttagcatgtactgtcccctcgactttaatgtgctttcatcaacagcttcttgcgctttgctacacttatcaaatcggcgcttgcagcgccaactcgctaagttaggcaaatgctcggaagctaaccgtggatgacgcacttcttttctttaacgtgcttttcaaaccatattcctgtgcctagcgacacaagtcaaacgattgcttgcagcaatcattcgccttgttagactagtgctcggagtataccaggtttgaacgcacttcttttctaacgtgcctcagtaggcgtatttttgcggctagcgacgtccgtcaaacgaccaacaagttggtcattcgccagactaggctagtcctcgaaatataaccgcctactgacgcacttctttttaatctagtcactgattaattatagggtatttgacaccaaattgcacctttacgcggttaatttccataatttccaactaattcctaatccatttaaatccataagtcaaactaatcgacttttagccccaactctggtacgtttaaagaaattgagaggatgtgtttgttatggaaaaattcggttttaatcactttggcggccctgacgttttcgaacgtttcgatcagcctcaaccaactccaaaggacaaccaagtcctcattaaagtgctcgctgctggattgaatccatacgatgttgcactacggaatggttcacaagattcagtgcgcccattacccttcccaatctttcctggtacagatgtggttggtgaaatcgttgaacttggtgctgacgtcgatgattaccgcgttggcgaaatcgtcatcaatcaccgatcaatgggtgcttatagcgaatacgtaacggctagtactgcgaagattctccgtaagccagccagcatgagtatcgctgaagcagccggtttacccagtgccggcatcactgcttacaatacgctgatgcacttcacaaactttaaacacggcgatacaatcgctattatgggtgccagtggtgccgttggtagtttactcgttcaattaagcttagcagctcatttaaacgtgattgcaattgccaatagtgctaacctagactatctgcgctcattcggtgtccaagaagtaattgcttatgatcagccatctgacttcgaacgacttgcgcagaccgctaaaatcggtatcaacttaagtcgcgatccagaatcaactgaacgcctcaataacttagttgcaccaggtggcacattcacttcaacgaccatcttaccaacagacgatcaacaacgcgctgacatcaattaccaatctgtctatccgcgtaaggattatgcagatttaaccgccttacaagatttaaatgaattgatcgatcaaggtttactacacaataccgtcttcaagacgctcccatttactttggaaggcattattgaaggccacaagctccttgagagtcatcatgccccaggtaagattgttattagccactaattttataatgataaaagaaagagtctagaacaaaacgaagttttgtcccagactctttttttgatctttaattatttgtttaatgcagctttagcagcttcaacaactgatgtaaatgcagcagcatcgttaacagctaagtcagctaacatcttacggttcatgtcgatttcagcgactcttaaaccgtgcattaattggctgtatgagatgttgttcatacgagcagcagcattgatacgagcaatccataacttacggaagtcacgtttacgttgacgacgatcacggaatgcataacggtatgaaaccattacttgagtatttgctgatttgaataataaatgtttagcgccgcgataacccttggctaattttaaaatctttttacgacgtttgcgcgtcactgttccacctttaacacgtggcataagaatttcctccttgaataacaaacaacgtcaaagcgttgctgtactgatctaatttttgcttgaatccgaaaatgctatggcttatttaaggcctgataacatttgacggatacgtctcatatcgctatttgaaaccattccagattttcttaattgacgacgttgtttcttagtcttgccgtggaaacggtgacttgtgtaggcgtggctgcgttttaggccgccattacctgtacgtttaaaacgttttgctgaagcacggtgtgtcttaaattttggcatgatatttcctcctaataaatcagaaacagattttttatttttggtcctttagcggttctaacattaagaacatgctacggccatccattttaggacgtgctgtaactttagcgatgtcctctgtttctttagcaagtctttccaatacacgttgcccaatttctttatgcgtaattgcgcgccccttgaaacgaatagaagctttcactttatcgcctttgccaaggaacttacgtgcattgttcaacttagtattaaaatcattttgttcaattgtgggactaagacgaacctctttgaggttaatggttttctgcttcttacgagcgtcacgttgtttcttttgaagctcgaaacggtacttaccatagtccataatacgagcaacgggtggttttgcgtttggtgaaaccaaaacaacatccatattagcttgatcagctaatgcaattgcatcttgagtactcttaataccaagttgttcgccatcttgagcaatcaaacgcaattctcgtgcacgaataccatcgttaaccatcaaatcttttgctatgactcttcacctccataaagtttagagagaaaatgcagctaagtaataaaaaaagcggccctctcataacagaaaggcccgcttgttcggttacttagttcgtccgaattagaaactatcagcccagagacatcaagtgtctactaaggcgagaagcgggaacttctgctttatttctcaacgaaaataagtatactcggttaggaatttaaagtcaaggaaatcccgcatttaaatttacgtgtacttagttgccgtaatgattgtccactaagtgcgtggcttttacttcgtcaatgttgtgtgtaccagctaattgcatgactaattctaattctttttgcaagtagttaaagacactttgtaccccttgtgcaccgccaagtgctaatccgtaaatgactgggcgcccgattgcaacgatgtctgccccttcagccaatgctttaaagacgtgttgaccacgacgcacaccactatcaaagacgattggtacccgtttattaactgccttagcaacgacgtgtaatgaatcaaaggctgcagggccaccgtctaattgacgaccaccgtggttggatacccaaatccctttagcaccggcttgaagtgcaatttcaacgtcttctgctgtttgaatccctttaacaaagactggtaaatgtgtgtattcagaaatgaattcaacatctttagggttcaaacgttgtttagctgatttgtagacggcatccattgtttggcccacacctgtttggtaagcttcaacgattggtaacccgactgggaatgtaaaatgattgcgtttatcggtttcgcggttaccaccaactgtggcatcagctgttaagacaatcgctttaacgttatgcgccatcgcttcatctaaaatcttacgattgatatcgttgtccttactcatatagagttggaaccattgcggtgcgccatctgctgcggttgccatatcatcgatacttgctgacgcaaatgaactcatggttaagattgaaccgtaatcagccacacctttagcggttgccgcttcccctttagtattcactaacttatgagctgcaacaggtgccataatgattggtgatgttaagtgatcgccaaagatttcggtagttgtatctggattttcgatatcttgtaaaacccgtggtgcgatgtatttgtgattaaatgccgtaatattttcgttaatggtataaagatcacccgcgccactgtaaatatacccaaagccacccttgggaacaacttcgccggcttctttttccaagtcatagaggttaataatgtccaatggttgctctgctgaacctgcttgatatttttctatcgtcataataacgcctcccattaatcaacgattggaatcgtttacatatttattataccgcttttttagttgtgcgcaattaaaaaaacaaaaaaacgtccgaaatgtcaaaataacatttcggacgttttaataaccgcttataggttgattgttttgtgatctttaccatcgcgactgtagttaccaacttcagcaacgattgcatctacaaacatgtctgaagcttcttcagcagcgttttcttcaccgtatttacggacagaaaccgttgcgtcagcaacttcttgatccccaacaactaatgtataaggaatcttgcttgtttgggcttcacgaatcttataacccatcttttcattacgatcatcaatgcgcacacgtaaaccatgtttgatcatcgcatctttgacgttctttgcataatcataatgtaattcattcttaacgggaataatcacagcttgagttggtgctaaccatgttgggaaagcgcccttgtagatttctgttaagtaagctgtgaaacgttccatcgttgatactaaaccacggtgaatcataactggacggtgcatttcgccatcttcgccaacatattgtaattcaaaccgttctggcaacatgaagtctaattggattgttgaaagtgtttcttcattgcccatagctgtcttcgtttgaacatccaacttaggaccgtagaaagcagcttcgccttcagcttcaacgtaatctaaaccaagatcatccatagcaccttttaacatcgtttgtgctttgttccacattttatcatcagcatagtacttttcggtattagcaggatcgcggtagctcaaacggaatgtataatcgttgatattgaagtctgagtacacttcaatcattaatttcaaaattgacttgaattcatcttgaatttggtcaggacgaacgaatgtatgtccatcatttaaagtcatttcacgcacccgttgtaaccctgaaagcgcacctgatttttcatagcggtgcatcatccctagttcagctaaccgaattggtaattcacgatatgaacgtgggtggtgtttgtaaacttggatatgtgatgggcagttcattgggcgtaattcaagcatttcgccatcgcccatatccattggtgggaacatgtcctcacggtagtgatcccagtgacctgattgtttgtacaaatctaagttcgctagaattggtgtgtaaacatgttcataaccattggcaacttctttatcaatgatgtaccgttcgattgaacgtcggatggtagcaccatttggcaaccaataaggcaagcccgcaccaaccttaggatcaacaaagaataagtctaattggttcccaatcacacggtgatcacgttctttagcttcttgacgacgctgtaagtcagcatctaagtcagcttgtttgttgtaagctgttccgtaaatccgttgtaacatcttattacttgatttaccttgccaataagcgccggcaaccgataagagttcaaagaccttaacgtcgctcactttagctagcattggtgctaacccaaaatcagcaaaatcgcctaatttgtaaactaagacttggtctgtttccatttcatctaataatgctaatttgtaagtttgcccagcaaatagtgttttagcagcagctttgtctaagctgacacgttcgattgccccgccagcttggattaacttgctcattgcttttttaatgtctggtaagtcggtcacagctacttgaccagcttcgttttcggtatcatagaagaagccatcttcagttgcatgtacttcgccgaattgcatctcgggataagcacggttcaacgttgcagctaaaacaaaggctgccgtattccaaattgccatcaaatcggttgctttgtcgtctttagtgatgatttcaattgccccatcttctaaaattggttgctgtaaatcaactaattcaccgttcaatttaccggcaattgcctttttagctaagcttgtactaattgatttagcaacatctaaaagacttgttgcttgttcaaatgccttttgagcaccatctggaaaagttaattgaatctctgccattactattcactccttctaatttgtcatcaacaataaaaaaagtccctgagacgcacgaattgtgcagctcagggacgaattaatttcgcggttccacccagattgagaccccaacatttggttctccaactttaagcgtctataacggaaacgacccgatcagttgtattgcctttgaaagtggtcaattaaatgggggtgaaaaactttcagctatgtttttctctctgcgatggttcatttaaaaggtgtctttcatcattgattgattctattaaaacacttaattgcttttttagcaagcctaaattactaaggttgtaagcggcgattttgaccaccaacttcaatttcttgcgctaaatagcgcacacgttgcatgatgcgggccgctttaaccggttcgtctccttggttgctagttgtcaaatgcgtctctaattcagtcattgtgaagtttgaactgaagaaggtggcgagttgttcttgcattcgatattgcaaaataatgccaagtacttcatcccgaacccacgcactcattgcatcagcaccgatatcatcaatcatcagaatcggtgctttttttatcacgttgaccttttctaacacattgttttgcccaattgcattcttcatctccactgcaaatgtcgggaaatgaatcaacgtggtttcaaacccggataacgccagttcgtttgcaatcgcacctaacaagtaagtcttgccaaccccgaattgcccgctaaggtacaaggcttggtgaaaatcatggggtgcttgccgataagccccgataaacgcggtagctttgatcaatgcgtcaaaccgattggttggatcgtatgaatcaatcttggcctgttcaatatcgcgcggcatattaattgacttcactcgtgcatgcaaggcagcttgttcgcgctcttgtaataaacttaccgtaggctcataactgacatcgataaaatggttatttaagactaactttggcgcataacccggtgccaaagtggtttgcccattagctaacttcttcttttcgatgacgtattcgtaaattttagcggcactacgcgtgaccgtttcttgtgataagcggtctttgttagcttgtataaatgcttggacatcggaatcgttcaaggcatcttcgaccaatttattaaactgttggtttaacttttgccgattcatgtaatccgtcaaatctttacccatattttccattacgattcccgcccctcacgaatttttttcaacgccgcttctagttcatgctgatgctcaggtgtggttgtttcttttggcgcttgataatctggtttagcccatttaggtactggttcttttttagttttattctgataacgcgtttggcgattgttttgcacctttgccgtctgtttggtttggaaatcgcgaatctgcaaaatcgcatccgctgccgtcttaaccccttgttgagcccactggttcgcaatccgatcgactagcgcctgagtgagcccatcatattgcgtaatgatataaacgaccaaaatattgagcacatcattgttaaagatatagcggttttgcaagtcctttaacgcccggatttcatttttagcgacaaagccgtggttcttttgtttcaagtattcgagataatcaactggcaagtagccctgactttctgttagccactgcaattcctgttcgttaaagccggctttttgccattctttttgtaactcggctaacggtttttgcgttgttgtagcagctggcgtttgccggttactctgacgtcgtgtgtaattgttcaagacgttctgttcgagcgctgccatattaatcgtactgtcagcaacattcatcgtcaagccaatcaaacgcgctaagtccatctcatctagaccatagaaataatggagattaaacaagccctgttcatttttgagaatttgatccgtatcaatctggtattgcgccgttgcatcttgtaataggtcccaatcaaaagtccgcaactcaaccgaggtaaactgcggtgtgctagctgctttttgttgatacattgccttagtttcagccacactgcttggcacgttcgtcaataaatcgttttgcacatggaaaacggtcaagaaattcttagtgacctcttgataatccttggcgtaaaccggtcgtagcttgaaatagtcacggagttccacaaaccgtgtttcgcggaccgcttcgaacaatgccacacttaacaaatcatcgttaaaaaaagcttgtggttgcaatggcgcatacagttcatacaccaacttgcggccagttccctcatttttttgatacgtccgcattaaaccaagtgcttccaatttgctgcggctgtcataaaaagcaggtaaatcaacactcaacagatttaacaaagtcgcatgtgtttgaaaatgttgttccgtttctttcttggtttgactccataacaaaagatagagactgtaagcaacagcccccatcaatggttgatataagtaagtgacgactgtttgatcgaaatcggtcaaatagttagcttttgtcactgaaaagccgtcttttggactcaaaaaatcaaatgcatctgacatcggctaacccctcttccttaattcgatttcttcgtcttttctttattcatcatttcttgtaattcactcataaagacattcatatccttgaattcgcgataaacactggcaaagcgaatgtaggcaatctgatcaatatctggtaacaagcgcatcacgtattctccgacggcttgtgaagagacttcgttttcacccaatgagcgaatcttattctcaacttcatcaactacttcagtcatttgctccattgtaacggggcgtttttcagcagcacgaattagcccgcgcaataatttatcacggttgaattcttcgcgcgttccgtttttcttgattaccaacaatggggtttgttccactcgttcgaacgttgtaaaccggaaacgacaattctcacactcacggcgacgacgaatcactcgcccttcatccgtgggacgactatcaattacccgcgaactattctgatgacaatgtggacatagcataatgacaccttcttatcttttgattaattcgtttcaaattcaatccaattttaaaacaattagtataacagtagtataacatgccaggcaagcaggctaaacaaaaaatgtatcagtctcaaggcatttcgccttttccaaacaaaaaagcggtcgaacagaataatctgttcgaccgcttgtattacttgttatgacacaactgttgtaacaacgccaaaacacgttgccgcaacattgcaggtgtgccttgattatcaatcacgaaatccgctcgcgcttttttggtcgccaaatcactttgactatcaattcgcgcatttgcctgttctatagtcaattggttacgcgccatcaaacgttgcaattgtgttttacgttcaacgtagacaactgcaacaccatcgcaatattgctcgtagtgttgttcatataacagtggcacatccaacacaaccagcggtgcatctgctgcttgcatctgttgtttaatggctgtcaaaatagcgggcccagtaatcgcatttaactgagtcaaagcctctgggttaccgaagacttgctggcccaacataggccgatcaacttgaccatttttgacaactgcttcgccaaaggctgcttgcaattgtgcctgtaccgatttattagtcgctaatacctgatgagcaacttgatcagcatcaatcaccgggattccctgttctttaaacaatgccgcaacagtcgacttcccactggcaatgccacccgttaaacctagaaaatacgtcattgaaccgcttctctcttaatctgacaccgcggacagaaatgcgtgccacgctgtgctactttaattttctcaatcggagtctggcaccgatcacacggttgccctttcttaccatagacgtgcaacatatcctgaaaggccccagcgtgacccgccgcgtttaagaacgtattgactgttgtcccaccgttattggttgccagttctaactctgtgatgatttcatcatgcaaacgatctgtttcagctttcgtcaataaattcgccggtgtttctgggtgaatctggctcaaccacaacgtttcgtccacatagatattcccaagacccgttacaattttttgatccagcaacagtggtttaatcgcttttttatgtttctgtaacgcctgatagaaggcggttttcttaaacgttgttggggttggttcaacccctaagtccttcaatccagaaacagtgttttcttgacccgtttcaattaataacattcggccaaacttacgtgaatcaagataacgtaactgttgtccatctgtaaatgtccaaatcacatgcgtgtgcttagtcattggtacggattgatcatcaacttcgtatttgccttccatccgcaaatgactcacaacagttaagttttgatcgaaacgaatcaataaatacttaccgcgtcgatcaacaccgataatttggcgtccaacaagaccttcaacaaaaacatcgtctggattactgataattttcgaccagcgaatctcaattgcttgaaccgtcttaccgaccactaattgttccaatccgcggcgcacattttcaacttctggtaattctggcattgtgtgtccccttatttcttaatatcgtaccaagttggtccaaagccactttcaactttcagcggcaccgctaatgaaaccgcagaatccatgacacttggtactaatttttctaacattggtatttctgattctggtgcttcaaaaatcaattcatcatgtacttgtaaaagcatcttggcttgtaatcctgccttcttcagttccgcttgcatcaagatcattgccatcttaataatatcagcggcactcccttgaattggggtattcattgccgtgcgttctgcaaatgagcgcaaattgaagtttttagcgtgaatatctggtaaatagcgacgccgatggaagagcgtttcaacgtagccttcttcgcgcgccttcttcacgatatcttgcatgaattgatgaacacctggatactgttcaaaatacgcttcaataaagcgtttagcttcagcccttgtgatcccaatattttgtgataagccatagtcactaatcccgtaaacaatcccgaaattagttgctttcgcttggcgccgcatatctggtgtcacttcatcagcgctcgataagccaaaaatcttcatcgcagtattcgcatggatatcgcggtcttccttgaatgcctcttgcatattggcatcccccgaaatgtgggctaaaactcgtaattcaatttgggagtaatcagaagcaaacatctgccaacccggttgacttgggacaaacgcttggcgaatcttacggccttccgctagacggactggaatattttgtaagttgggatcaaccgatgacaagcgaccagtctgcgttaaggtttgcaagtaacgcgtatgcaccttattatcttgatgaattgacttcaataatccttcgacatacgttgactgaatcttagcgatttggcgataatccaagatggtttggacaattggtgcgtcttttttaagttgttccaagacatccaccgccgttgaatagccggtcttggtcttcttaatcactggtaaccccatcttttcgaatagaatgacgcccagttgcttaggcgaattgatgttaaacgtttcgccagcttccgcataaatcttttcttccaaaatcttcagcgtttgactgaactcgccccccatttgttgtaggcgacttgcatcaactcgaatcccggtgatttccatatccgctaaaactagcgctaatggcaattccatatccgtgaataaatcgaattgttgatgtttttttaattgttctgtcaattgtggtgctaatttgtaaatagctgctgctttttgaatcagatgttgataaagcacggttggatcgacaggaactgcgcgtttagcccccttgccataaacagcttcatctgtttggacattttgatactgatgtaaatttgcaaccgttccaagatcattactgttattcgttgtattcaacaaataagacgctaatagtaagtcaaattgaacccccgctaagtgaatccctaagcgattcaccgcaacctgattgcgtttcacgtcaaaaactgctttcggacgtttagcatcttctaaccacgtttttaaaaccgattctgtcaagagtgttacgtcgtcgctgacataccagtggtctggtcggccaatgtaaaagccaatcaagtccgctgtatggtaattgtcggttaacatttcgatgccaaacgcaacgttttcagtggttgtcacgacatcggcgatgttatcaagggttaatactgtaaattgatagtcttcagtagccgtgggttcaactggtgcaacatctaattgatttagaaacgacttgaagttcatttcttggtaaaaagcaaccaaagctgccatatcaggtccgttgtacaccacatcgtctaagccaatcgtaattggcgcgtcacgtttaatggttgccagtgtcttactcgtgaaagctaggtcgcgatcttcaatcaaatgttctttcaatttactctttttcatttcatcgacatgttcatagacaccttcaatgtttccaaattccgtaatcaatttaagcgcagtcttttccccgacctttgtcaccccgggataattatcagaggtatcgcccatcaatccttttaaatcgataatttggcttggttctaaaccgagtttttcttgaacgtgttcaggggtatacgcttcaatttcattgacccctttaacagtgatgttaacggttgtctgactagtcgtcaattgagttaaatcgcgatcaccagtgacgatatcgaccgtgaaaccatcagcttctgcttgtttagcaagtgtaccaatgatatcgtccgcttcgaaattagcgagttcataagactgaataccatatgctgttaagagttctctgatataaggaaattgttccgttaattcaggtggcgtttttgaacggccccctttgtagtcggcaaattgttcggttctaaaagtggttttgcccgcatcaaaagcaactaacacgtgtgttggttcaatctttttcagaataatatccaacatattcttgaaagcataaatcgcattagtgtgcagtcctgcctgattggtgaaatggtctaaagcttggtgcattgcaaaaaaagcacgaaatgcaacactattgccgtcgactaataataattttttttgagaacccatgttgttcctcctacattcgtaaagtgactagctctattctaacaaagaaagtgacgcgcgtcattatgcgcgaccgttgctaatcgcacaaaaaaaagccgcaacaaatggttgcggccttttttaacgtttattttgcttctgggcgatccatgttcattgatgccatgcgaccaaagatttttttgctttggtcgattgttgcgccaacagtatcttggccgatttcattttgtaaatctttgtacaagtctacgtaatagaacaagagatgacgataaacttccaaacccttttccgtcaaatgaacacgacgaatgcgttggtcattttcatcagattgttctgcgataaaagccatcttacgtaatgaacgacattgacgtgaaatcgctgaacgactcacttgcatcttatctgccaatgcactgttagttgtttcattattcgcattttgaatctcgtgcatcactaaaaattggtcgaaagataaaccgtatttttggctttcacgactcattgattcgctaaggttgttaatcaaccaccggtataaacctgcgaattccataaaatctgctgatgtgctaccgagtaaatcggtgttattactcgtatccatttctattcctcctacatgctgaaactttcagtatcaatagttaaccatcgataagtttcatactcacactattcagtacttcaattcttccgtgttctaagatagccgatctaaataatacttagtcagctaatcttaaccgtacttcgatttaaagcaatataaatagtctatagtattaaattatatatttcaactaactttcactaataatcatcaacaacgttcattatgagttgccctgacaacctttattaaatataatttattatttattttaccaaaacaatccacgaagtaaaaaatacagcctcaaaaaaggctgtatttaaaattacttaataattgtgattgtaatatgacgacgaccccaactcttacatgccgcaacagttggaaaatgaacatcaataatgtgacctttaatcgcgctacccatgtcaccagcaattgcatacccgtaaccaggtaccaaaacaagtgagcctaatggaatgacactaggatcaacggcgatacaatttgggtttttagttaaatcaattccagttgcaccaaaatggctcaaaccaggttcggcagttgaataagccgttgcttgcacttgaatcgcttgtccggccttgccatcagcagcgcttgctaaatcggcttgctgggcatttgtgtccacaactggtgcaattggcgcttgtgttgcttcgtcggccgcttttttagctgcttcagccgctttggcttcagcttcttcacgtgcttgttcttctgctttttctttagcaatttttgcaagatccgcttggctttgacttaaattattctttaagccagccacttgttgttccagttcgacagattgttgatccaaactgcttcgttgttcatcaagttctgtcttgctagcttgtaacttatcttgaatggcttgtgtatcacggtaactctgtgctaattcatccatattatggttgtcagcactttgaagaaccgtcaatgtgtaagcccggttgaagaaatcactcaaagaatcagctgacaatagtgcgttgacaacgttgcggtcatcggctgttcgttgaagtgattgcaagcgttccttagcatagcttttacgttttgctaaagtggcttgttgctttttcaaaagcgtttgtgcttgttcgatatttttttcgttatccttaatcttttcctttaaggcattaatttcttgatacttcgcattcacgctcgttaaagtggcttgaatcttcgaatttgtatcatcaatacttttttgggtactgctttcttgggcttgtaattcgctcaaactggcagcactaacagatgtgcccatcgtaaccattgcaactaaacaggtaacaacagctaacgctagttttctaaatcgcatcttgttaaactcctccattcataactcagacttgattatacgcaacaatccccgcaagaagattgcagattaatgacgttatattacagtttgaagacatttataatttttgtgtaataaaaacccacttgtaaccgccgacaaaccaaatacttccaatagaaaaagctaccacaaaagtaaattttgtgatagctttttgactttatacttagattttaattaaaggactaacctttaatccgaactgcgcgggccatttcacgatcttgttcttttcgtttcagtgtttcgcgcttatcgtattcccgtttcccttcaccaacgccgattaaaactttggcaaagccgtgtttcaaataaacccgtaacggcacaatcgtaatccccttattcttcgttaaagcaccaatcttggtaatttccttcttgtgcaacaatagcttccggttgcgcaatgggtcatgattaaactgattgccttgttcataagggctgatatggacattttcgagataggcttctcctttacggacgcgggcgaacccatcacgtaagttgattttgcccttacggaccgatttaatctcggtaccagtgagcactaagcctgcttcgaatgtttccaaaatattataatcgtgaccagcttttttattctgtgcaattaaatttgctggtttttgaggatgtttctttgccattcaatcacctactttttaaaagtacgtttttgtgagtccttgttcgcagctgggcgtcttggatgattgtttttcttttgatcaccacgacgttgaccgcctttttcatgatcacgtgggcgtgctggacgttttggtcgtgcttcaatcttgcttaagatttcagccgaagccaatggcacttcttcaccggctaataattcaaagtccactgagtgggcatctaaatcaacattcgcgaccttgacccgtactggttggccaatgcggaacatcttatgcgttctttcaccgacaagggctaattggctttcaacaaagctatagtagtcatctttcatctgtgagatgtggacgaggccttcaaccgtgcttggtaatgcgataaacatcccaaagctggtaacagaactaatcacagcgtcgtattcattaccgaccttatcaagcatgtattcagccttcttaagatcaacgacttcccgttcagtatcgattgagcgacgttcttcaagggatgtttgttctgcgattggttgtaacttaggtgcccatttttctttttcttcaatcgtcatcccatttgtggcataactatgaatcaaacgatgaaccatcaaatcagggtaacgacggattggagacgtgaaatgcgtgtagaattccgcacccaaaccaaagtgaccaagggattcatcagaataatgtgcttgttgcatacttcttaataacatcgttgtaataatcggttgttcaggttgaccttcaatttgcgtcaagacttcttggagcatcattggcgtcactttcttacttgaaccgtgtgcttgaatcccataagccgtgataaattcaaagaaattcttcatcttatcagcatctggtgtttcatgaatccggtataagaaaggtgcattagcagtactgtaatgttctgcaaccgtttcattagcagccaacataaatgattcaatcatgcgttctgaaagaccgcgttggcgtaattcgatgtcgatggccttgccattttcatcaacgataatcttagcttcgtcttcttcgaaatcaattgcaccacggttatgacgcttcttcaagagaatttcatgtaattctgacatcgtttcaaacattggcacgagccgttcgtattgcgcccgtaagtcagcatcttgatctgttaagatcttattgacgtttttgtatgtcatccgcgctgttgacttaatcacacttgggaaaatcttgtgatccattaccacgccgtgttcattgatttccatttcacacgttaaagcgaggcgttcaacgtctggatttaatgagcaaatcccgtttgataagcggaatggcaacattggaatcacgcgatcagttaaataagtactagtcccacgttctaaggcttcaacgtctaatggtgaaccttcagtgacgtagtaactcacatcagcaatgtggacccctaagtagtagttgccgtttgccaactttttaacgttaactgcatcatcaaaatctttagaatcgtcgccgtcaattgtcacaacgtcttgatccgttaaatctttacgacctagtttatcagattctaaaaccgtatctggaatcgcttctgattgaagccgaacttcttctgggaagtccgtcttaatatcatgttgatacacgattgataaaacgtcaacgccgggatcattcttgttaccaagtacttgtttggcaatccccagcatttgacctggcgcctcaacacttgggtaaccggtaacgtcaacttggaccatgtcacccttttgtggatgtaacccattatccgttaaataaattcggtaattacttaattttttggcatgactttggatgtatccaatccagcctgttttttctttttggatatctgaataaggcataaattcgccgacgatttcttcaatcccccgcgtaatcactttcgccacttttccttcaggaccgcggcggctgttttcttcggcttctttaatgatggccacttcaaccgtgtcaccattcatcgcaaaattcgtattgggtggggcgataaagatatctggatcattaggttccttatcaacgattgaaacgaagccaaagccacgatcgttagcatggaagaccccttcaacaaggcggttgctagctggtaatctgaacttaccggcatcgtccatattcaatgtcttatctccttctaattctgctaatactttcactaggtctttgaacccttgtgaaccggcaacgccgattcgttcactaatttcggatacgtttaattgttgcgttgcatctgcttcaaaaattgcaagaatcgctgctttcatctgttcaacttgtgtcacatcaacacctctttctcatttcttaaaacggtttataaattctaggacatctgtttctaattggtgatgcgcactatcgaccgtaatgacgtggccggcttgtggataccaatgataatcaactgttatgttttgttgcgttaattgctggtgtaagaattgggcttgtgttggatcaataacttgatcttgtccgccttgaccgatgaagaccggtttatctccgatttgcttcaagtcagccacaacttgtcgactgaaaatgccaattgatgcaagttgttgtggtaattgctgattaatagtcgccaaacgtgctgtctgttgcgcagccgggacgcccattaactgcatgattcgattagcatattggccaaagagcggcgtcaatttagcagtcggtccttcgagtactggcgcactaaaaatcccaccaccacaaacttgtggtagttcttctaatgcccgcatggcaaacaatccgcctaatgacaatccgaaaacaaataacagttgtttgttagccgcggataactgctcaatcgcagccaccgtatcggcccaccatgcatcgacagaaccgcgcgttaaaatctcggttggatcagccgttgcatgccctgcaaactgtggtgcactaaccgccagctgatttttctccaaaaagcggcccatcatacggacatcattcgcactacctgtataagcatgtaacaacacaaccccgactgaaccaccgtcaaaataaaacggttgcggcaaccgataagacatgcgctcacccccaaagtccttactgcttgaattcatttaaaaaggtctcctgccattcaacaggagaccgcatcaacgttcttattagaattcgacccgtctcacatgtattagtgtgatgataagtacactaaagctaatgcaaagacgaagaataaagcccctaaaacaacggttactttctgcatgaaagcttcgaaaccacgggccttttgcttgccaaataaatcaccagaaccacctgataacgcactcaaagcatcctgttgtttacttggttgcatcatgactgcgatcacaatcaagattgaatcgattaataataagttcaggataagattttccaacctaattccctacctttctatctacactgtcttttaatactttagcataaaaagtagttaatcaccacttttttatcgattatttcacgagattctcatccgtatttcgcaaggcttgggcagcgtcttcaatttgccgccgcaccgtcgcccgtagctgatgatccgttaacacaatcaacgtgtcaccagcacgaatcaacgtatcaccatgcggaatcagttcggattcgccacgaacaatcgcgattaacaaacatgtctttggccagtccacttcacggacttggcgatcctctaacggtgcgcccgcaaacactggtacctccaagcgatcagagaatgttgctaacttacgatatggtttgccaagtgcgcgttgcaataatgatgcgtaaattggcgcgccccccattaagtcaacgacgatgtaggccaccaacgataaaattgctaatggcatcaagtgcacgagcgaacctaccatctcggtcactagtagaatggccgtaaatggcgccttcccgattccggcaaagtaaccacccatcgcaaaaataattaagttgggaacataaactggtgctaaccaaccaagttgaaccattatgagtccataaagggcaccgattaaagctcctagtgataaaatcggtagaaaaatcccaccaggtaatcctgaaccgtatgaaatcattgaaaaaacaaaccgtaataggaatagaccggccaccacactggttgtcggtaaattttgtccaaggtgtgcaatcaatccattgccaccacccaaaatttcgggccagaaataaccaatcggcaaaacacataataatggcactaatccggtatacgcttttggcagcgggagcttcgcataaagttgtggtaaccacaataataccttctgataaacgtatcccaacagtcctaatacgacaccaagtatcaacaaatgccaatactgattaattggcaaactttgggagtacgtaatatgtaatgtcggtgtcaaaccaaaaaaatttaatgaaatgaagttcgctgcaattgcgctagcaagcgacgtcacccaaactaacggtgaaaagttatggtagatttcttctagtacgaaaaaggtcccggcaattggtgcattaaacgcagccgataagcccgcggcagccccactagcgattaaaatccgacgatcagcaccgcgatttaccaacttagcggcgaccccctgtccaacggcagcccccagctgaatcgatgggccttctcgtcccaagaataagccaggtgcaatacttaaaatgcccccaacaaatttacgccacaggattgaccaccaattgaaatcaaactcaccttccaattgtccttcaacttgtggaatccccgaaccacttatattcggttccttttttaataattgtgccacaagcaggccgatcaataaattggcaccaaccaatggcacccaataccacgggtgtgcatttaacccttgatagatagtgataacaaaggccagtcctttttcaatcgctaagcgaaataaactgaccaccaatccagtgaacgccccaactaataaccctttgcccacaaagcgaaaccgtgtcttattaaactgactagcacgtctaagtcgtccatttcccacgtttgcctaacctccatctgataatgctttatatacagactaccacggaaatggggattatcaaatgttgaaaccaaataaaaaggcgagcactattgctcagcctttattgatggatatcaattttgtatttcaatttaatttcataaaaaagcctttagattagtttatctggtttcgctataacccatcaatcagctaccaacgttttaacttgataggtaccgctattgtgcataacgtttacccgatacgttttacccgaaactgttaaacgcattggtgtaaagacattgccgcttaattctccctcaaaggcctggccaaacactattgtccctatgctgtggtcttcttccatgacaagaatcgtatattttttaaataggtcatttgcaaaagtcaccatcattttggcatctttaagcgttacatccgcaataagcgcattcaagaataactgttgtgcctccttcatttttttcgctagcgcttctttgctgtcttgtggtaactgatttacttgctgccatgctcgatctaacactttttgcgtcacatttggtttcaacttaccgtcctgttcaaataaatccgatactaactttctagcaacaagcacctcttgactaatcactttcactagataagtaccatgcggtaaagtcaccgctatcgagatcgcagtggcatctttttggtttggaataatcaattgatttccttcaacacgaccaacattcggcttaccattcgttacttgagcaatcgtatgtgtatctgcttgaacttttaaatcgtcatattccttaagttttccatcagcaaatgtcaccacaagttctgattctgaattcagttcaatttcaccaactaatacgtctaaatatctttgttggagctttttaaccatctccattaattcttctttatcagtattaggttgtagtgcatcaacctgttggcgtagattgtttaatttatcttgcgttagaatcgtctcgattggttttgttgtgtttaaatagttttccaattgttccctaagcgaagtcccactgatcgattgattaaaccgattataagtcccattggcattttgttgttcaatgataatcatatcggttacatcaagtggttcatcaatctgccaaatatcattaataactgtcccattagctggtttcttatcagccaactccgcgatcaccttgccatttttcttaacaattaatttctgatccttaaagatattaatttgatagtttgttaagtcaactttaatcccttgtttactgagcgacacagccttcattaagctcattggcaattgttttttagtttgattgtcatttaaccaaattgggtcagacaacgttgtgtagttgctgattttcttctgtacttcttcagaaactttaaatccccattgttcataataagggagcatattatagcccgttacttcagagacatgtaacaaaaaatgctgcattcgatcttcatttgaatcataggctaactgattttcgcgataatactgatgtaagatcgggtagaaatcatcgccaaaggtgtttgctagttgggcaaacattgtcattttgacaaagtccccttgttgattgaagtttttatgatcagaatttagataggcgtgcatttctggataatacttatctaaatcaggcatcgcacccgtcatttctttttgcgctgctaacgaataaatattaacactcgattcgacaacttctctccatgtccatggtttttgttgtctctgatgaccacttccatgccagattcccaaggatcctgaagttctaataaacttttcatagctgcatcgcctttaaaacccatgtattcgtttgtcgcatacatataatacgatggcgattctaagaaatgttgtaaatggcgatctgaaaagttaaccggccgaccttcattactgatccctgaaactcgatcttgagcgaccaggaatcggtcataattagccattaacgctttgggatcccccaaatatttcttttccatctcataactcacagtaattaaagcacgatcactaacaagttgaacatcttttgcgtctgtcatttcagtcatttgtttcttaaaatcttcgacactcgtcttgtttgcatcaaagaacggcatttcaccagtggcatcaaagattgacaccctagtaccgcctgaatcatttggattcgtcacataaatagggccatcattttcaactgtaatagtcgtcaccccatttacgagcggatatcgtttctgaacatctcgctcaggcgagccaatcgtcagcgacatcaagtcttgacccgttttgctcaccgtcagcacgtccccttttttggcgtataatccggaaggctctaagcttgaataactcaaggccctttgttgccgagccaattctttattaacatcaccgcggccaatatacagttttgaatatggcgccttttctgaacgtgttacacccttctggtgcctcaccttaggttggaggctatcatcaagcacctcactttgcttactttggtaattagaactggtcgtagcccttgcttcttgtaaaacactcatgcaactggtcgttaaaatgccgaacgctaaaatacctactacttttttgatagtctcatctcctaaaaaattatttttggaacacatttaacttaacacgcttcaccaactccgactataataaaacgataatggtttccataaatattatcgacacacaaaatccatattactgcgataaacaattagaccgataagcatacaacacgtattatacaaataataaaaagcattcttcccgctataccaaaccaatgaaaaagtcgtctaaattcgtattttaattcccattataaatcattatttttttaatattccaagaaataaaacacgtcaaaaaggccaacgcttatacgcaaaaaagtagggaccattttccaaaagtgccttaatttccggtgtttctggcgttttaaattccaagatcataatggtgacaataatcgcgatgacagcatcgctaaatgcttctaatcgacccttattcattctatacatccccttaaccaaaatagctaattttatattttacactatttaattatgatgtgctattatttatagaatgcctgatgtaccagtgcattcaacaactaatccccaacaatcctttcaaagatacttaaaaataaattgatttcagccattaattaatagtataatttatctacgtagtaagggaggaattatcatggaaagagagtatcaatcacgcgcttcacttaaaaaagaagttaagtcattatttgctggtcattggggaaaggccgttacgttgaacatcatccccactctgctatcaattattggggtgattattgtcggagcagtcttgatggtcatgattgccatcttcgcaaacaccgacccatcaatggctgccaatgaatctttttcgggccattcgtctggtagtagttttgctggtcaaattccaagtttcattttggggctcattacacttgggattaattttactttcttagattggctccgttcgaaagatgctgattttagttcactcaaaggagctttcagtgtcttctcaaaacgttatttcttgggcgcttttctaattcgaattttagctagcttatttacattcctttgggcattgttattcattattccggggatcattaaaggctacgcttattctcaagcttcgtatatcttcaaggacttaacagataacgatccacaagctgacgttagctttttagattgtatcactaagagtcgtgagttaatgaatgggcataaattccggtttttcgtcttacaactaagcttcttaggttgggatattttagctggcctctcacttggcattggctatttctggttaacgccatataagaatgcaacttatatggcattctacaaagatcttgcaggcgatcaatttttacagacaacttctgcagatgaaccaactgaagaagttactgttgaagcaatttaaatgaactcaagacgttcttaattgggcgtctttttttgtattatgcggtgattagcagtaggcttagactaaccattttattcagaaaggatgacgtcatcatgaccactaatcaccaaatccaacttgataccgaacataattggcacgcagtgtctagtgaaatccctacgcctaaacctgaagagctactgatcaaagtcagggcaagtagcgtcaaccctgtcgaccttaaaagacgagctagcaccacaaccattttaggctatgacgggtatggtaccgtgcaagcggtcggcgccactgtgaccaactttcaacctggcgatgttgtcttctatgccggcagtacccagatcgatggcagtttccaacactatcaatgtgttccggccgcgatttgtgcgcttgcgcctagtacaatcagtgccgcggagattgccggcttaccgcttgtttcgttaaccgcctatgaattactttttgaaaagcttggttttaccgctgaacaaaatgccaatcgtggcaaacaactattgattatcaatggtgccggtggggttggatcaattctcagtcaactcgccaagtgggccggattcaccgtcactgccacaagcagtctcactcatttcgactggctaaaaacaaacggagttgatcacccgctggattatcattcacctagcagcttagacaacttagccagtcttccggataacacctttgatgccatcgcggtcctttatgatattgaaagctatctccaagaggtcgcacggctgattaaaccgtttggacaagtcggtacgattgttggcaatacgcatccacttgatctcgcaccgcttaagcctaaatcagcctcattttcatttgagtacatgttcactaaaacggactatcaattccaaaccactagtcaaggggcgattctccaacaaattgcgcggctaatcgatgcgcggattctgcatccaatcaccaccgcccactacacaggcttaacggtcgctaatctccaaatgattactgataaactgttaactggccatactactggtaaacagggattggtctactaaacgcaaaaaagccgcaaccaaattggttgcggcttttttaacacaacagtcatcgagttgcggggattgaacccacatcaatcattcattttacgcttcgcttttaatagccaatcgcttttgattttcttgggaggaatttcaatttagatgattggttctaccgttaaactataactcattgggtgttgctaagacacttctttagggaggaattgtctcataaaattaacttgctcagattcacttacttgggagatgcttatctgatatttatagaataccaagcagttgggaccaaattgtgaactttcaagtatgaaatgatgtccgttaaaaaaagcccccaccactttggtgagggctcaattttatagctcatcttccgtcgcgaacaaaccatacttcactttaaagcgactgatgattcggtaccacgactgataaaagaagaaaataaaaaagacatttgataaagcatgggccaagtcaaaatagaaactcgcgacataggctgcaataaaagtcttaatcgtcagtggattgacgtatgcgacaaaataccacatattcataatccacccaaaaataaagccccagacaaacccaaaaatacagagcaagtatttattctgtgcccactgatggcgactaattaagcctgccgtaacgcccatcatgccccagcaaaacatttgccatggggtccatggcccttgtcccaaaaacatattcgagacaatcgcggcggtcgaaccgacaataaaacccgattctggaccaaggactaatgccgacacgataatcacaaaactagttggctgaacactgggcaatggtgcaaatggtacccgagtgactgccgcaatcgccgctaaaaccgcgatgaaaataatttcacgggcgcgaatatcccgggtttcaaaccgccaataaaatggcagcatactggcaatcaaacagataaaactgaagattagaaaatgctgtccttttaaagtgacgataaacaacatgaaaatcgccataatcaagaaagccaatccaaacgtggtccaactattccttaaagctttcatgcgtgcacctcttcccaattcagggcttcgggcaattgactgcgtaacattcggttgatggttgtcgtatagaagaagttatgcgcgaaaaaggcataaggttcttcctccgatacaatcgtcccatcgaataataaggcacactgactagcaagccgggcactaaaggccatatcgtgacttgccataatcaacgttaagccttccgcttgtaaacgcgttaacaattcacccaacgcccgtttgcgaatcggatcaaggccctttgttggctcatccagtaagagtaactgcggctgcgctagcaatacaatcccgagtgcaatcaattgttgctcgccgccactggcatcttgcgggttacgttcagcaagggtttgaagaccgagctttgctagcatctcttctgccacttgttctggtgttgcgcgttttaactgccgcgcccgttcgataaattcttgacggacactatcataactgaaatgatcgctcggtgtttgtgagagataacccactgttttgaaaagttcagcttgcgcccacttaccgatcttcttcccctgtaacttgattgcaccatggcgcggttgtaataaaccaatcaaaagcttcaacaacgtcgatttaccagtcccatttttaccaacaatcgctaaccaatcgccggtatgaacctctagattgagctggtctaaaacataagggtcatttttttcatactgaaaactcacatgtttggcctgcagaattgttgcttggtcgttcgtggctatttcacgtttagtatgtgttaactgccattgtcgccgctcaatcaattgcttgccactgacaacggtcaatggtaatgccgcaatatcagctggtgcaatcaactcattttgtaaaaagacgtgtggcacatctgggacgaattcacgcaatgccggttgcgcccaaattgctgctaatccaccagcaaccggtccttgatacgttatctcaccgccatccatcaaccaaagttgattagagagcggtaaaatatcatccaactggtgttcactgataatcacggtgatgccgagttcgtcatgtacccgttgcaataaactaataaattctttggtcgcaatgggatcgagttgcgctgttggttcatccaacagtaaaagatccggctgtaaaatcaaaaccgacgctaggttgaccagttgtttttgaccacccgataaatcatgcacggaagcatacagcaaatcttggaaacctaaaaagctgactaattcggcaattcgtttttgaatattcgcactcttttcaccaatattctcgagtgaaaaagcgagttcctgaatgaccgtatccatcactaattggttatccggattttgaaagaccatcccaatcttctgcgcacttaacccttgcgataaatcagctaacggttggccctcgaaaataatctcacccgaccgtttaccaacgggccagagttcttttttgagttggcgcaataaggtggtcttcccgctacccgagttcccagctaacgtaatgaagtcacccgtctgaacggttaaattgatgtctttcagattttgttgggttgccaatgcatactgaaaattaaattgttttatttgcgcaatgtccaccataaatattcccatccttctagtaatagcggcaaactatcaattaataagactaacaccaaacatagccaaccaatttgattcaaatgaatcgagccaagtattggataaatcgctaagcggccaatcccctgtttagcaaaataaaaacaaagcgcactgcctgctacaagacttgccaatacccaaccatcccgttgggtaaatcgataacgttgataactcgttcgcttctgtgacccataaccacgggccgtcattgaatcagccgtttgtagtgcgtcaaccaatgaattaatcaataatacttccatcaaacgcatcccggcatgtgatcgggctctaacactccccgtttccatctgcacaccacgtgttctttggacattcttgatattggtaaaccgccgaataaatagtgggacaaaccgcatcgtaatcatcgttaataaagttagttgcggtgaaatccgcacaaataaatataagaacttatgattcgtcatactctgattataggaaacaaacactagcattaagatcgccagcgaaagcgccattaaaaaaccgtacgtgacagcctctgctgtgatcaccgtcccaccaaacgtcgtaatcacgtgcgccccatgattattcataatagggttcatcacgacgataaagagcatcatgaacaatgcaccctgcaatgtccccagtgttttcttctggtttttcgcaagcaagttcactgcaatcatcatcaacaattcacttacaagaaaaatcggatgaataaaaaccattgagaacgcaattgcaatcacgtaatacgcaaagatgacgattggatttaattgatcaaagaccagttgcgattttaaccctgaggcgcgttgcgatcgttcccgagattttccgtatacatccaatcaatcacatctccactcttaacaggataattaccacaagaatagttaggaaaactgccattcactcgataaagccatccgcttaacggtcctttatcaaattcgaatagcccattaatgcctttgatatagacgccgccgcccgtcccacgataggatagtgccatcccgcgactttgcaaatcacgttttaaaacataaatcaccatatccccatccttgatttcaacttgatcaccgttcaaccatttcggattaccttcactaattggtccataaacattgacgctcaccttttcaaggactggttggggcgtcgtagtgggcggtgtaactggtttactttcagttgattgtgacgattgattaatggcggattgggtcgatgccgattggactgccgagccttgttctacagcttgttgcgatgctaattgtttgctagaggccgatttttgtgatgattcatttgtctgttcagattgactgctggacttgcgcgtttcagctgttttccgactttcagataccgccctactatgtgactcagaggccttagatttaaccttaccatctaaaccaacagttgctggcttgacccgtttttttgatctatgttcctctttaacatgttgactacgcgtagacggattatcttgagccacactttgataggtaccgtatccgatgccgcttaaaataactaaactaccgataatcgcaatgattctctttttagacatatctaactcctaacgatgttcaacttgacgcttgaaccaaatgccaataatcccagtcaaaagtatcaagccggctacagaagcaactactgttgagttaacacctgtttgtggtaattgcttttgctttatttgagcatgatcttgattgtctgcttggtgtttattttctttttcaaccgtagtcacttgtcgttcaaacttgaaactgattgtattattcgctgcattaatcgtgatggatttggttggcgtgtcttttaattgataaccctcaactgcaacatcagatgcattaatcaacattgtgcgtccaactctttgatgctgcaattgaattgttttaaacactttgccgttttgatcgactgcttgcaccgtaacgtcagcaaactgcgctgcaggaattgtcccaatcatttgtttccgatactggaacgtcacggtcgttcccgttttagcaacttgaacagtttgttgtgcattgcctaataattcataaccctcaactgcgacttgattagcattcaccgtaatggtttgaccaacgggttgttcagctaattgaagactctttaaaatttgtcccttttcatcaactgcttgggcctttaccgatgctttttcaataactggcgttttaaaatcataaattgagccttttcccgcttggaacaaccggtattgggctaacgtataaacggcttgttcagttgacatcgctagcgatcccatatcgttattaatattccagcggaactgtccatctgctctttgataagcgaccagccgtgaaatcgggttagcgccttgatcgccaacaaatgttgtgactggatcaactccagctgcaattaagcccatgacaaccattgccgtactatttgagttttcttctgtcatataaacactagggattaaaaaaccacccgtttgtgcaacaaatgttttttctttcaacatcgttaccgctttatctagcgcatcttgaacgcctgggaagtcacgatgcatccccaacgccgtcatcgtcatcccggtcgtatctaaatcacttttactaccgaaaaaagcccagccattttcagcgttttgtgcttgtaaaaccgttggaattaaactatcaatcgcttgctgtgccttggcaccataatcacgcatgctaagggcgatgatgccgtaaacttgcccgttgatcccaccagttggtgctttttcaataattttatcaattatatttaaaccagcgaagttggttgcatcttcaccaagtgctgttaccccaattaccaacacttctaaatcggttgccgaaaaacgttgatcagcgagcattgattgtgcatccgcaaccaaggcattatgataactcaagcgttgcgctgcactcagtgtcacgcctgattgaatagctgctaacgctgaccatgcatctggttggccattattcaacaactgttgcgccccagccaccattgctttttgataatccgtactagatgcagtacgtggtgtcacttgtgtaacctttgtctcactcgcagacaccgtttgtgcactaccaataactgaaacaacaggcattattaacattaatcctgtccataataaggtaaaaaattgttgtcgcttcttcatttaactctcctcattccgattaactttgataccctataatttaccatatttaggagctagaaagttggccctataaggttaatcttcacaaatacgccttaaaaaaaacttcatttcaaacacaatttattcatatttcccgcctaaactaatatttattcagttttaaggaggaaatacttatgaattttatcaagcgtgcttggcaaaacgtcatctttaaaaaagggcgtagcttcttattaataattgtgatgaccgtcatcatgatttttatcatggctggtctattgattagaaatgcagccattacaaccgtcaacaataccaaacaacaggtgggcgctagcgtcaccctttctgcaaatcgcgatcaagcgtttaagaaaatgcgcgcctcggctagcagtgatgccccaagtactacagcaacgcgccctaaattaaccatgccctccgtcaaattaaaagacgtaacggctatttcgaaattatccgggctggcaaattataacgtcagcgtcacgacttctgcgaacgcctcgtccattgaagccattacgacatcaagtagttcaaataatagtggtggcatgatgggcggcggctctggcggcaacgctgagtcatccacttcaacaggtgacttacaaatcaccggagtgctcaataccgcaaccctcagcgactttaaagataatacaagtaaaatcacgaaaggtcgcgctttaaatagtagcgacaaaaacactaataatgtcgtcatcgaatccgaattggctaaagaaaacagcctcaaagtcggcgacaccattaaagtcaaagccagcacgacaggcaaaaaagcctatacgctaaaagtagtcgggatctataaggctagtcaaagtagcgctggcatgggtccacaacaaacagaccccgcaaacgtcatctatacggcatacacattagctaaccaaattaaaggtcaaactggcaaagtggatagtgccacattcacgcttagtgacccaactaagaaaaatagttttgtaaaagcagcgaagaagattatcaatacgaagaaattcacggtaacagctgatgacagtacttaccaatcactcaaacaatccatgcagaaaatggctagttttgctaataagattgtttggttagtcgctatcgctggcactgttatcctcgcattaattattatcttaatggttcgcgaacggcgttatgaaatgggcgttttactctcattaggtgaaaagcgcgtcaaaatcgtgggccaattattagttgaaatgttcatgctgctgattgtcagtttagctttagccggcattggcggacgattcgctggtcaagcgcttagcaaacaagttatgcgttccgtcacaaccgaaacgacaaccagctcacaaacaaataacatgcaacctggcggtaacggcggccctggtggcggtcaagcccctagtggccaaactggtggcaatcggccaagtggtcaaatgcaacaacctggccaatctgctaaaaaagccgtcaaagcaagcgaccttgatctgaagattagtgccgtcaccttaatgcaacttggcgcattcggcttcaccatcatcgcatttgccgtcttactcgcatcactcaatattttacgactcgagccacgcaaaattctcattggataattataggaggtccactatgttaacagctaaaaacatcagttactggtacgatactgaagaaaatacactttacaaagatgttaatctcgattttgaagccggcaaactctacggcatcatcggtagcagtggtgctggaaaaacgaccttactcaccatgctttcagggttagataaaccgcgccgcgggagtattttatacgaaggtaccgatatccaaaaaatcggcttaacccaataccgcaatcgctatgtgtccatcgtgtttcaagcctacaacttactcccctacatgtcggcactcgacaacgtcttgactgcgatggccattactcattcgacgcatgacaatgctgccgatttcgcactcgaaatgctcagcaaggttggcatcaatcccgaactcgcccataagaacgtacaaaaactatcaggtggccagcaacaacgcgttgcgatcgtgcgcgccatgtgttgttcagcccccatcgttgttgccgacgaaccaaccggtaacttagatgaacaaaatacgcaggagatcattcatctcttccaagaattagcccatcaacaacaaaaatgtgtgattcttgtcacccatgaaaaagaagtcgcagcaagttgtgatgttcagtatcatcttcaaaataaaacctttcaaccagttgcttaactaagtaaaaaacgactgagcctgtttacggcttggtcgttttttaacgggcatgctatactgagggcaatcaaaaggagggcttctaaatgctaacaatcttctatggttcttttagccatgctggccattcatttattattgcagcaacccccaaaggtatctgttttgttggttcacccgatggcactatcagtgaattaaccacttttcttccccaaacgaaattagttgcaaatcaagccgcaatcgctccttatagtgaatcattaacagcttatctcgatggtgaccaagccacgtggtcactgccaattgatattatcggcggcacaccttttcaaagaagtgtttggaccgccctgcaagctgtgccatatgatcaaaccacaacttacagcgctttggcggctcaagtcgggcaccccaccgcaattcgcgcagtggcttctgccattggtcgcaatccactattgatgattattccttgccatcgcgtctaccgtaaagacgggcaaattggggggtatcgtggcggacttgaattgaaacaaaccctccaccagcttgaaactcaaaccaaataaggggattaatttgaaattttgtcaataaaagtctatacttattattaagtcggtggtagaatgtacggttactctactcctttcaaattaagaaaaagagatgattattacgcaagtaactgatgtttatgggttaacccacgaaaactgcaagctgatcgaaactgaaaatgattttactcgcatcttcctagctgaaggtcctgatggtacacgttatacgtgtttactacctgatgcgaaacccaatccaaagtcaaaccaacactttgaatatggtaatccagcagatgcaccatactagatactaaaaaagcgccaacggatattagaatccgttgacgcttttttgttgaaacgtgttctcgccagcatatttctgcacttaaccaaatttaccaaatcagcgattacatcgccaatttggtaaatccagtcaatgctcagcactctattctgccattaatatatccaagaattgttcgccgtatttttctagtttattttcgccgacccctttgacatctagcatttcagtcaaggaagttggcatgatttcacacattgaatatagggtcttatccgagaaaatcacaaacggaggcacaccttgttcttccgctaaatcgcggcgtaactcacgtagttgttcaaataattcattatcttcaggcaacgttttttgcactttgaccgccatcttgcgcgtcactttcgcttggccttttaagactgcaactcccgccgccgtgatttgcagcactgggtattgaccgccagaagcttgcaaatatcctgaagcgactaagtaatcgatcaaaccactgatttctttttgcgaatcaccacgcattagaccatacgttgggagttcatcaaagcggaattgcatgattttttgattcttcgagcccgtcaatacttgcgccaccaacactttgccaaaccgttcatccatccgtttaacgcacgataagactttttgtacatcaatcgtgatgtcttgttcttcacgcgtatccagacagttactgcaccggccgcacgcttcacaatcatcatcaaaataattgacgatgtactgttgcaaacattgctgcgtattggcgtactgcgtcatttcttgcaacttggcatattcttgttgcttatgcgcttcgtccatttccgactgatcgataaagaaatgctgaatctgcacatcattcactttaaataatagaatcgcttcactcggcaagccatcacgcccggcccggccagcttcttgatagtaagcctctaaactcccaggaatctgggcatgcacgacaaagcgcacattacttttatcaatgcccatgccaaacgcattagtcgcgaccattatcggtttgcgatcatagagaaaatcctcttgattctgacgacgcaccgcttcgtttaatccgccatgatacattgtcacatctaacttagccttttcaatcagcttcgtgagccgttcaacttctttccgtgtgctggcgtaaataatcccggatttttgtttgttgacctttaaataatcgattaagtagcgatcactattttgatttttaactacttgaaacgcaagattctgccgtgaaaaccccgtcttaacttcgtgctgaatgttcaaccgttgcatgatgtcagctgccacttgtgaggttgccgtagcggttaaagccacaatcgttggtcgttggcgcatactctgaatcgtatccgtcaggcgtagataacttggccgaaaatcgtggccccattgcgaaatacaatgcgcttcatcgaccgcaatcaaatcaatcgttaattcagctaaatcagctaaaaagtaatccgaatccaagcgttccggcgaaacatatagtaatttcacttcaccacgcgcagcttggttaaagcgttcttggacttccccctgcgttagcgtactattgataaacgtggctggaatcccattttcattaagcgcatcgacttgatccttcatcaaagaaatcaacggtgataccaccaacgttaaaccgggtagcatcaatgctggtatttgataacacaatgacttcccgccaccagttggcataatcgccaagacattagtgcctgccaacaatgattcgatcacatctgcttgaccttctctaaagtgatcataaccaaatttttcttttagtaccgcttgtgcttgcatgccatttctcccacccgttaaaattcctaccttctatcataacaaagattcgttaattccggttaattgaatctcagtttcaagcattccttcaatcaattcttactggctgacaaaaccagcgatttagtgtttaattagaagcatcaaagactgtcaggaggcttcctatgaccttggaaattaatgcaacattaacggctacccaaacgatcgtcgatttaatcgaacaacccgttactcagcttttaattgaacaaacaccggctaatacaaccgcattcgcacaccccgctttattcctcggttttgcgcagcaacaactgcaacaaattgaacaactctccccacttgaaacagcctcgactgatcaagttgacacgggtatctggattaccatggatcctgagtggactgaacaaattggctacgtagggcagctattagccgagcaaaatcaaccaccgataacgagcgcctcgcttccgtccaacgtctctcaaaatttccgaacaaccttagctccagccgttgaagccatcatcttggtcctcagccgctttggttatcccctgaccaaaagcgcaccagtcaaagcaaaaccggctaaaacacgtcatcgatggacaaaagccatcagccaaatcgaattcactgttgccacgcgcgaagcacaaggaacagccatctggcaaaagcgcaacgagatgttattgaaagcaggggcacaattgcggccaaccgcgccacttaataaggatggctcgtttggctttgctgctaaaatgggcactcacttgcgcaacgaacatgcagcgcaaattcaagacaatcaaacgactgaagacattattttcaagagcgtgaatgaaatcggcctcttcttgtactttggtggcaccaatagttggctcgaactatgcgacacaaatggtcgctcaattgacgactggactaaaatctaaaatagaaaagagattcaacatgcaaattatcagttctggcattcatcacggctacttcgacgacctctacggcggtcatggcactcaatttaacgcggaaggtgtgccaacttattccattccgtttaacattcaagacgcacctagcgatacagtcagttatgctgccgttttctacgatctagatgcctacgaagtgacgcaagggtttccttggattcactggacacttgccaatttaaaaacgaccactgtcgcggctaatgctagccaacaagcgcccgatttcatccaaggtgttaatacttggcacagtcccaaaacagaccatttatcaacagaagcaagtgcttgctacggcgggatgacaccccctaaccgcgatcacacttatacacttaaagtatttgcacttgataccacgctcgatttacagcctggcttttacctaaatcaaatgacagcggcaatgcgcggtcacatcttagatagcgctattttagaagcacaataccgccaatttaaacattaggtgacaatggccttaactcggctaacacttttgtcatctgatcttaaaatcgtcgcttttttacgcttaacatcgtatgataactttatcaattcggaataaggagttctcattcaatgaaaaaaaacaattagcattattgcgataatcgccctcatcatcgtcggatttgctggctaccgttaatacaaaaatacgtatgtcggcgaagtaggctacgccaaagttgctgctcaatctccagctaaagaagccaccaaagatgattcaggtaaaacagtgactaatatgtatagctatcactaccaactaaatgtggtgaaagaagatggtagccaccaagtggtccctgtcgaagttactggcgaaaatccaacgccactcactcccaacagctatgtcaaagttgaatttaattcaaaacgcgtcttaaaagggcctaatactgtgtccaagaatcaaattccggctaaagttctggcgggtttagataaataataaattagcttatcctagtaccattaatacttgttattagctgttaccctcttaaattaagttattaaaaagcagtacccttgattagttatcatgggtgctgctttttgtatgtttcctgtgaaacattttgttttgtttgattttctttaaggcttcacgttgggcgaagattgttagttcgtgttcttcaacaaacgtcatcacccactcaggattttccttactatagttacgtaaagcccagccaattgctttttggataaagaactcatctgtgtcaatatctgccagaatggcttcttccaaaaacgccacattcgttttttcgtaaaaactgagttgtagcgtaatcgcaatccggcgcagccagaaattctcagcacctataaaatgctgtgcaacccaatcaaactgttcaggatgcagtctgatgtactctccaaatacttttcgccaagcatcgatgctgtcccaccaaactttttccaacaccaacgttaataaatgttccatatcagccggttcccaccaacgtactgaacgcaatgccatctcgatggcaacatattgatactcacgcgttggttgagcatataaagtctcaatgaactgcattatttctgctggtgacaattgtttcacagactgccacaattcgcgttcaattaaatggcggtccggtgctttaacaccgttaaattcaaattgactctgcatgtatttcttcattgccgcctgattttctggatatatcggtaattcaaaatccatggttatccctccactatatcgcctctaaaaaacttgtgccgtttgtttagctgtttcaatagcttcctgcataatcacgttagctttttctggcgaataatcaattccttcgatactaattttaatgacttcgtcaacaccggcaaagccaagaattgttttaacgtattgtgttgcaaaatcttggccagcataaacgcttccggctgactgaatatgaactgcttttttcccagttactaagggctgcggagctgtttcagtatgtctaaatgtttttccagccaccatcactgtgtcaatccacgctttaagtttcgtcggtacatttaaattccaaagcggattagcaatcacaaacttatcggttgctaagaactggtcggtatagcgattaaaccgagcgaccttctcttgctgactagcgcttaaggtggccatagcttgcccttttttaacgccgcccatgccgtcattagttcttgatcaatttctggtaagtcagattggtacaagtccaaccaactgatttcatcagctggattttgtttttgataaacttgcatgaactgcgccaaaatcgttaacgtccgtgactattctgtagcaagtggatgcgccttaacaactaatactttactcattaatttccgccccttagtatttaaactttatacactatcgttttagtatactatctgcggcgttgtccataagctttacatcatttaataaaccaaccacctattaatgaccttttacaacgttttatacagcaacaaacaaccaaaaacgattaataagtcataaatataccgcaccatcgttcgactatcaattcgagtgctcacccaattgcccaacggaatcacaactaacaataatggtaagctaagtcccaatagttgcaatacttggatggtccaaaagcccgctaaaatatgactgattacaacgattgtcccaacacaaataaaatgggcctgtagaatgccccttaacgatgctactggccatttttttaatgtcccataaatcaccactggcacaccatgactattgtaggcactgcccatcacgcctgatattatcccagctaaataatcccaatgatgtgactgtaaatgttgctgctgcacgtgatgtcggtgtaactgatagcgattatagctgtcataaaggattaaaaacccagctaacgttctcaacacaatcgtcgttggcacatacgtcatcagcgctatcccgactggcacacccaataatgaaccaatcactagtcgcctgacaaccgctatatcaatctgttggcggtggcgaatcactgccggaatcgccacaattagtcccagcgcgccaatcaaagccgttgccgcttttttaaatcaatcgctactagggccaataatggcatcgttactaatgcctcaccaaacccaaaaaccgttctggtaaaagcgcccaacgcaacgatcaaaagaatcataattatcgtcatccaaaaatccttcctaaaccgttttgttccacacaaccttttcaaactgcgtgccattactttttagtacggataaacttgcattagcaaccattttttgtgatcgaatttcctcaaacggaatccctagtagtgtgttgataacaaacaataaaataatcccatgcgcaacaactaatacatcaccatcaggatacgtcgtttgagcagtcttaatcgcgagcatcccacgttctaagaccgcctggtaggactccgcgtgaatctgtttggcatcaaacagctctggatgatggaagtaattttcatattgtggatggttcgtcaaactagcaccaggttggccttcccaatcaccaagtgccatttcttttaaatcatccacgaccatgattgccggttgtgattgattagtctgcgacactatcgcatccattgtttcaacggcacgtgttaatggtgacgtcagtaacgcatcaaaagactggtccgctaataaactacctagtcgtttagcagccgcttgccccgcctcagttaatgttgaattcgtcccaccaccattgaaacactgtactcgattaaccatcgtttcaccatgccgtacaaaataaaaagttgtcatgttgatcccgcctttataggatctatcatactataaaatgcaaaaaaagacgcagttcaaattgaactgcgccttcattgagcctcgttttatttaccttccgacgtgttttctgccacgacttggtcataggcctttgtaccagcatagacttcgtcagttaggatgttgcgtttatacttcatgacacgataaatgtggagaattaagactgccacattaatgaccagtgctaaaccactgattgtcatcaaagcagcactactgtgcgtaccttgcactgaaaattgtgaatccgttacaaaagcgggataactcattgtaaacatcatccaaaaagccaatgtttgcgcacgtgcttggagccagctcccttttttaaccaggaatgctgctaatgtacatgaaattaataatgcagcgcccgcatagaatgagtgatcaccaacacaattgtaaacataggcgaagttccaaacatcataggcgataatccaaggccagatttgatcgggccagatcatgtctttttgtttgtcatgactgataataatgccgaaccagcctgagattgtgatgatgttaataattccggcaatcccgttcatgatattccacgcgccaccattcatgatcacaccgtcgactaagccatgtaggtgtgaaacttgaaaatcacgaatcacagcttccataatattaaacgctaaaattgcgggtgggaaaatcaatgcccacttgttgtgttgtaacttagggataaagcgcagcgccataaaccctaaacaacctgctaatgctgagtacactttaacccagtggaaccaagtcccggtactgctaccaggaccagccgtcgttggccaaacaaagagcgttaaaacgactggtaacccaacaaagagaattaatccaatccacttgttagcccgagctgcttcatttaaaaccattaatgcaataaccactagtccccaaactagccaatccattcctgaaatattttgaaataaaaacatatcagtcacctccaaagaaataattgctaattacattcttactttaactgcaagctggcggtttctgtatggtcaattcaggataaatgtccaaatctaatgattattttgtaaaacatggttcacagtaccatttaacatgcgatgcatgcgctgataaaattcctctttagattcttgtagatttgttacaagccattgcgtaatctgtgtcgccaatgcccaaccataaaattggcaatttcatctcggaaagtcgctggacaatccacctttaaatcttgaacaacccctgcaaccatgttaaaagcaactcgatacaaaaaacgacttagtaaatctcgattaagtgaatgaaacgtatttaaacagaaatgccgattgttttcaatataagttaccaagacacctagaccgacgacccaatcccgttcacgttgatacactgccagttgcgtaacaatttcacgattataaatccaagcaaccaactcattaatatcggcgaaatggtaataaaacgtattgcgcgcaacgtcagcactgctcgtcaattgattgaccgtaatgtgatcgaccggagttgttttcatcaattcttttaaggtatctgctagcttttgcttggtatccatcgtattgccctccaaaaattatctatgattagcatcccatagatagttccgaactgcaatcactaacccgatttgcactccaggataaattgttctatcgttagagagtacaattaacggaggcgacttataatatgcacgaaactgacgacgcttttagggcgatgaccaatggggaatggtactttgattcagcggtcactattcaaaaacgggatgcagcccgccttgccttacaaaaggccagccaaatcttagataacgatgcacggatggccactatccaaaaattactcggtcataccggtagcgattttttcatcgaaaccggttttgaatttagcttcggtgaaaacattacgattggcgatcatttttacgccaatcgtaacgtcgttatttgtgacgaagcaccagtcaccattggtgactactgtaaatttggcccaggagtatcactcttaaccccttaccacccaattgaccccttagaacgtgcgacaaaaaaagaaatttctagtcccattactatcggcaatcacgtctggctcggtgcaaatgtcacaattctgccaggaatcacgctcggcaataacgttgtcgttggtgccggcagtgtcgtgaccaaatcctatccgggtaacgtaattttagttggtaatccagcacgggtattacggaaaattcccgctaaataatcaaaaaggactgacaaatgtcagtccttttttaggcttcaattgcataatattcaataatcgtttgtaaagcctccgctgcgcgttgatctccaattaacttagtgtagtatgctgtaaatcgttcatctgctacatacatggctgctaaaccgcggtgcattgctagactataccggggagtcgctgtttgtaaccacgtttgatgggcttcaaaggctgtttgcgccgcttctgatggcaattgcggctggtccaagtaagtttgtaatgccgtcttcaatcggtcttcagccgcctgcatcgttgcatattgggcctcacttagccctaaaaagtgctgatcggcttcttgcttggcttgtttcccatagttagtcgtcacttcttgcccgtagcgttgctcattttcagccactgcctgttgtttaaactgtttgaatttagtttgatctgtcatttgaattcctccggtttgattttgaagggtcgcatctagctgtgctaacgttgccgttagcgcagcttgttgtttaaccagttgttcccgctgatttgctaagcgttccagacgctcggccggtggtaacgccaacagctgctgaatctcagccagactaaactgtagttgacggtacattaagattaactgcagtcgatctgcatcctggctcgaatacgttcgataaccattactagcaaccgttggcaccagtaaaccgcgctcgtgataataacgtagcgtacgctcagaaaccccggtcaattcagcgaaagttttaatctgataatccatttgccttccctccttcaaaacccactataaggcctgacgtgacgtgaaggtcaagcattgttcgttagtgcctgattaatttctgtttaaccaagtaatcatgggccacatcgcgtgctttgcggtgtttgacctgtacttggtagttcatctcttgcatttggctctcagtaatctgacctgccaagcgattcaatgctttgacgacttccggatgcgccttggcaaagccggctttcataatcggtgccccttgataaggcgggaagaagtgacgatcatcttctaaaacaactagtttgtaccgtgcgacttccgcatcggttgtataaccatcgaccacatcgaccttgccgtccgcaatcgctttatagcgaatacttggctccataattttagcatttaaatttaattgataggtgtcctttaacccttgatacccatctttttggtgataaaaatcaggatcaaaaccggccgtaaatggttgattcaaagcggctaaatccgaaattgttttgacattatatttcttggcaaaggccgcagtaaccgccaagtcataaccgttttgatagcgcattggcggtaagtacgccatattgaactgttcttgtagcgatgtttttgcaagttgatacgttttagttggattctggtttgtcttagttggcgacttcaccaacgtctgtaaaaccgttcctgtgaattcaggataaatatcaatcttatcagccttcaaggcgttaaataagaatgtggtcccaccgaaattaggtttaaccgttactttgtagttaggctggtcttctaaaattagatcacgatacatattcatcaagatttcgggttcactacccaatttcccagcaatcgtgatggtggtctgcggcgcttgaaaccgtgtcattccttcgatcacaccgaaaaggccaacaaaaatggctaaactgactgtgatttttttaaaggataatgtccctaaccagcgaattaatgcactgaccactaacgctaaaaccgctgaaagtgtcgccccaaccaataatagtgcgttattatttgactgaatcccaacaagaataaacgtcccgaggccgcccgcaccaatcaaggccgccaaggtagctgtcccgataatcatcacgagtgcaatccgcaaacccgagataatcaacggcatcgcaagtggcagttcaatccgtagtagccgtttagcgcgcggcaacccgaaggctatttctgcctcttttaatgctggatcaattccgatcaaaccagtgtatgtattttgaaaaatcggcattaaggcataaagtactaacgtaatcacagccggaatcgtcccaattccgacaagcgggatcaataatcctaagagcgccaaagacggaattgtctgtaagacactcgtgacttgcagcattgcttcagctaatttctgatgagctgttaaaacaatcgccaacggaatcccgatagccgccgcaattaataacgccaataacgaaatctccaaatgttgcccaagtgcttgtagcaactcaccggattgggtcgttaaaatttgttcaatctgttgcatcatcgttatagcccccgtttcgcaatgagcgttgttaaatcggtcatcgtcaattgccgttgttcttgaccatcagtggcaactacgcccccatctggatggtctactaattgttgcgctaattcagctaatgttgcactggacgtaatcgttgtcggctgattattaacaacagttcctaaatcggccgccaataaatcttgaactgtcaacgatgcttgttggcgttcaatgtcaaaaaattcgcgaacaaattcattttttggttgattaaaaatcgcttttgctgtcccgacttgctgaatactgccttggcgcattaccgcaatttcatcacccaagcgcaacgcttctttcatatcgtgggtcacaaatacaattgtattatgcagctgcttttgtaaactcaaaacgagatcttgtaattgtgtacgggtcaccggatcaagcgcactaaagggttcatccatcaaaatcaccttagaactagttgctaacgcacgaataatcccaatccgctgctgctgtccccctgataattcgcttggataacggctagcatactgatccggatctaaatggaccatttccaaaagttcgcgtgcccgtttttgacgatcagctttggtccatttcaatacctctaattgaatggtaatattttcctcaattgtaagatgtggaaacaacgcaatgttttgtagaacgtaaccaatattgagccgtaacgtttggagatccatttgattgatgggttggccgtcaatcttaattgtgccactcgtgggttcaattaaccgattaatcattttaaccgttgttgtctttccgctaccactcggtccgaccaaaacaaatagaccattgtctggaatggttaacgtcaagccatctaatgctaagctttgttcatattgcttagtgacaccttcaaattcaatcatgtgctactcctttttccggttaacgatttgttaacttattgtaccacttagcaatcagcccaccaattgacgtgcttaaacacccaatccaatttttttgattcgctttgtgactatgctaagatgaacccgaattgaaatctgaggaggtcttaatatgcaaacacactttgatacaatcattattggtggcggtcctggcggcttagcggcggcttacagtctcgctgaacaacagtccgtcttagtcgttgaaaatgatttatggggcggcacttgccccaaccgtggctgtgatcctaaaaaaatgctttattcagctgtcgaagcactcgacaatcaacaagcgctccaaacaaatggcttagtcggaactagcgctattaactggtctgaactgatggcctttaagcgatcttatacgcaacaaatcccaactggtaccctcaacggtctacaacatgccggcatccaaaccgtcacgggcaccgcccacttcagtgatactcaaaccttgcagattaatggtgacacttacactgccgaccatttcatcattgcgaccggtcaaacaccaacgctccctacaatcgagggtcacgatttactacaaaccagtaatgaatttttagacctcgatcgtttaccagaaaaggttgcctttattggtggcgggtatatcgccattgaactggcaaatattgcagttactgctggtgcagaagtccatattattcaacataacgagcgtattttacgcgacttccctgaagttttaacacataaactcgtcaccagtcttcaggaaaaaggcattcactttcattttgacactgacgtcacaacaattacgcaaaccagcaatcagctaactctcagtaatcaagctaattttaaactgacagtcgacgccgcttttgccgcaatgggccgcaaacccaatatcgaccaactggcattggaaaaagctggggtaacagcgaaccagcatggcattcaagtcaatgaccatttaatgagtagtaatccccgcgtcttcgccattggtgacgtcgtagatcgtgtccaacccaaattaacaccagttgctggttttgaaggccgctatgtcgccaaccaactactcgctaaaaagacagcacccattacttacccactcattccacatacggtatatgcaagcccacaaatatcacaagtaggcgtttctgttgcaactgcacaagctgctcctagtcaataccgcattaatcaacaaaccgtcacaaattggtataccttcaatcgtattcaagaatccgacgcaatggtcatcaccatttttgacaatcaaactaaccaactcgtcggtgctgcggcttacaccacaattgctgaagaactcattaattactttaccaacctgattaaacatcagacaaccgcaacggaactcaccgataccatctataactacccaagcccggcgagtgatttaaaatattattattaaaaaaagtgttgagggccaacttactcacgaccttcaacactttttttaattttcttttttcgccttcatctgtaaccagatattaaacgcgagcacaatcaccaataggactgtcgcaatcagcatgatgttatgcaagccttggtacataatcgcgcgcatcgctggtaataagtgcgctggtaattcgtgaacgcgttggagattgcttaacttattcatcatcgccatcgtaatttgaccgtgcgattcggcaatgccgcgtgttaaggcatggtttaaaatcacaccgtaaatcgatgacatgaatgtttgactgagaattcgcaagagataggcaaacgacgtcgcaatgggaacatcacgttcttcggcatcttcttgaacactgatttgtaggacgttaaaactcatcccgagcccgaaaccttcaaaggcccccatcaacagtaagaaccaaaacgatgcttggtcgcccatcatcaacataccgctaaacgcaattaaaaacgcaactgttcccaatgtcacaacgcggtgtttacccaatttaggctgaattgcgggacccgccaatgagccaattaagttggtcaccgcacctggaatctgcgtcattccaccgagtagcgcacttaatccaagtagcccttgtgcccacattggaatatagatattaaacgcgataaatgcgccccataaaacaacaaataaaataaagtcggtcaccaattgcggatttttaaataagcggttcggtacaatcggatcaactgcccggtcttcaactctaaacaagacaactaataaagctaaaccagcaaataccaatcctaaaacgagtgctagcgaacccgtcccaatcatttgaatccccgtcaataaagtcaccaaactggtaatcataatcccagcacctaaataatcgacgtttccggtttgatgtgatttaagcgtttctttaaagaaataacgaacacaaacaattgatactagggcaattggtacattgatataaaagacccaatgccaactaaacgtatcgacaatccagccaccaattaggggacctacaattgaagccgcactataactcgcagtcgcataaccaatcacctgcgcgcgtttgcgtaaatttttgtataagtcggcatagataatgaatggtaaagtattcatcccgccagcaccgatgcccatcaccgttcgtgcaatcagaaagaagacgatattccccgaaaccgcctgaaaaatcgaaccaaccgcaaataataatgtcgccagctggtaagccccacgatttccaatccgttcgcctaatttactccataagggggtcgcaaccgccatccccaaaaggaaaaccgccacaatccagcccatatattgaatcccgtgtaaatcactgataatagcaggcaaagccgtgttgataattgtcccatcgagtcccgccattgtgttggataataataatgctaatgttaccaaaagtgtatttttcttactcacgattgcgtgctccatgtatttttcttttatatttattatagtataagttatttcgtttaacgagcttacttcagtataccaatcacttttaatatcataccttatcatatacattttcacacaaataaaaaagacgccctcctcaggacgtcctctaactttaatttaatgcgtcaaactgttcgactttttggcgagctttatcactccgccgcatccggataccatattccgttaaaccaatcacaacagcgactatcaagagaatcaataaactcttccaatcttgcttcaaaataagcaaatcgcccgcaaaggcgtagataaacgcgacaatcgttgaacccccaaagcacgccaggccctgtgctcggggggtgaggtgggtgtctccagccgccaagttgacaaaggccgtaggaatcatcggcactgcatagccaattaatacaccaagcgctggatgttgcatcttaattaatgcgcggtaaacacgcgaatccggctttttactgcgatgatttctgacacgggcaaataattggacttgcaacaagttcccgatcgtcaagccaatcgcattgaccacgaaaccaccccaatgacccaaacacgcgccaataatcaatgccaccgctgatgttggcgcacccggaattaaggtgaccccaatcattaacagaccaaacaccaagaaagcatacggccccagatgacgaatctcaagcacatattggcggtaattttgccattgatccaagaaagcaaaaacggcggtctggtgttgccatccaattagaagaatcactaatcctagtaaaatcacaccgcttgctagccaaagtcgtttccgttgtctcttcgtcatcagattcccctcatttctacttaacaaatagtcctagttcctctagtataaacaacctgcaaaggggacaacaagtttattttctattttgattcaattcgttcactaagcgcttattttgatagcgcgtgtagtaataaaaaataatcacgtgcattacgaatgttaataacgacgtccctaataaatacggtgaaacaacatcaaataacgttgtcgaatagagcctcaaagcgagtatttgaaacccaatattactaatagtactaatcaaaacattccacggcgcaccgaacgtcgaatagcgccataagtatgaataaatgacgccaaacacaacgccaatcaacacgcctaggctaactaatcgccaagcagccagcgcttcgccccgtgttagcgttgtgacaacagtgagccacataatcgccattaatgccacttgattaaagtctttgcggatttgcttcatcattttaaccactcctttatttgcttggcataataccgactaacaatatactgtcttccagattacgtatagaccaccaatcgcgcatttgaacccaccgcaaaattggcaacttgctgcagatttaaaatcgttgtgttattaattctcagaaaaccgttctgtgaaaacggggctaattgttttaaattactagggtagtaatagctattgccatcgattgtcgccaccttcgccaaatgtccaaaggccgtaaaactttcaattgccgttaatgatctgttttgtaatcgatctgttcgcgcatctcgcacctgaatcgattgatcaaaggttagcttcttaaaagcagattcaaccgttgcttgattctgtggttgactgtgaacgacaatcgtatcttgtgcacactttgaatcccaattaaatataattttcattaactcgcctcctctacaaacctaaagatagcagaagatctcgcttaattcgatgactatttgttttgttgcaagctgctctctcttgttgcatataaaaaagcctcattcaacaatgaggccttttatgcctatctctatttgtgatacggacttccttgattaatcataaacgcccggtaaatctgttctgtcaatactaagcgcatcaattggtggggtagtgtgagcttgccaaatgaaagtgcatcattggcgcgtttgttaaccgcatcgctagtcccgagtgacccgccgatgacaaatgtgatatctgatttaccataggtcgccaaatcttgaatttcctttgcgaattcttctgaggcacgttgtttgccttgaatcgccaggacaatcacatgttccttatctttaatcttgttgagaattcgttcgccttctttgtctttgacgttagtcatttcagcgtcacttaatgattcgggcgctttttcatccgcgacttcaatcatttcgaacttacagaacttactgagccgtttcgcatattccacgatccccgcttttaaatacttttcctttaatttaccaactgtgattactttaatgttcataaatagcctcctactgttacttacattttaggggaaaacaatgcagaaaaaaagctattcacagtaattcaccggaaagtactgcttatccacaaaagttgtccacatatgcacaagtgttcgtcccaaatatggtatctcgaatttttcttgatactaaataaccgacacctaaattttttcgttaaatttaataaaaaagttatccacccttttttgattgttcgttctcaaattatccggttacaaatccttttatatcagcgttattctggtgttataataattttaaaaaagttatccaccgcctgttaatttttttgtggataactaaaaagaccttttaaccgtgttatacccacaatccacagacttatccacagacgctcggatttcttcccaggttactatccacattgacatttttaaaacttaacattcctgccactttagtctgaatttaaccaaaataaaaaagccgtcaacatctaattgatgctggcggctttaatttattttgctgccgttgtactatctgttgatgctgcttcagtcaacttcactgttgatttcttcaattcaccattatgataatactgaatttcaaccgtactattcatatcgtaactgtaaagtgtcgtgtgtaaatcagcaacacttgtgacatccttgccacctaaaccaacaatgacgtcgtatttactaatccctgccttcttagcaactgagttggcattgactgatgcaacaactaccccactcttcacagaggttggtaatttcaagactgatgattgttgcgttgatgaaacattcgtcaaatcgatgacgctaatcccaagcgctggtcgaacaactttcccatttgcaaccaattggttaataattttgaccacttcgttacttggaatggcaaagcccatcccttcaaccgttgtgctcccgttagaagctaacttcattgaattgatcccgatgacttgtcctgcaaggttaactagcggaccacctgaattcccagggttaatcgctgtatcagtttgaataacggttgcttggccagtcgcttgaccggttgtttcatccgtcacatcaatcgtccgtttctttgctgaaataatcccttgggtaacagaagtagcatattctgagcctaaaggcgaaccaatcgcgagcactgattcaccaggtttaatgctgtcagaatcaccaaacgttgcggtcttcgtcactttggcactatcaatctttaaaacggctaaatcagaaacggcatccgttccgactaagctagcatcaatttttgtgccatcactaaggatgacttccaacttatctgagccagaaacaacgtgattgttcgtgacaatgtaggctttaccatctttcttttcgtagattaaacctgagccttcactcgattcttcaagctcactactactactttttttattggtactatccgcgccaaagagcgcactcaaatcgcctgaattatcttgttgtttttgcaagttaacaactgacacaaccgctttgttgaccttattaaaggcagttgttgtttgtgaagatgagttgactttgatattactaattttagtggcacctgctttagttggtacttgggcagtgcttgagacagtgttacttcccatctttgaaccggcataaccagcaacgccaccaccgattagtgctgcgataacggcaacaacagccgttttcattaatcctgaattctgattcatactaattcacccaaactttctaataaattctgtttattgattatctctatcatagaatgtaaatttgaaaaaattatgaacaagttacgaatattaaattgtttttctaatccgcattttagcgaacttatttcgcaaaaacaactaaaatgtcttctattcagtctaattacacggcaaacaatggatcagcaactgccggatcagtatctagaatttcaaagtctattcccaccccataatcatgttcctttaagatcgacgcaaccgtcaaatgggccagttccttcatgttattttcttgactcaagtggcctaggaaaacgcgtttagtctggttccccataaacgacatcaaagcggatgccccatcttcattcgataaatggccggtatcactgagaatccgttgtttcaatgaccaaggatactttcccatccgaagcatctctaaatcgtggttgcattccactaaataagcatccgcattttcaattgtcccacgcacttgatcagagacataacccgtatcggtcaggattgcaaaggcacggttattatgatggaattggtagaattgggcagcagccgcatcatgtgacaccccataactttcaatatctaaatcaccaactgacaaggtactacccatttcaaaaatgtgcttgtgttcagcaggcacttcaccaataatcgaagccatcgcatcccatgttggttgatttgcgtacacgtctattccgtatcgccgggccaaaacaccgacaccactactatgatcgcgatgctcatgggtcactaataaactgtccacatctttaagatcgcggccaatactatgcattaaatcttgcacacgtttcccactcattcctgcatcgactaacactttatgattaggtgtttcaatatacgttgtgttgccagaactactgcttgcgagcacgctgacttgcattgcgtctttttctaccatgttttgctctatccccttggtctctttctaaaacaactaaatttcactacggttcttcatcagcgcaccggtaaaggcgttaatccgcttaacgacgacactcttagaattcttattctcaatggccacttgccaagctggcacgtacaccgtactactattggcgtccaacaaagcactgtatccgagtttcacccacataatgcgtgagttattcggaatctcattatctgtatataaatcaatgaccgcgtcttgagcagtcaccttcgtactttctttttcacgcaaaacttgaatcttattcgtgtaagtttgcgtgtaatgactaatctgcccgtcttctaatgtaaaaatcaactgaccatgttcatccatgatctgcccgcctgggactttttgcacatatacgacttgttgatcactcgataatgcgtgtgaatagcggtagtcctccgcttgaaccacgttgtctggttccttcataaaggccgccacggctaagcgttggttcccttttttgtaagtcagtggtttatccaattcactcgtcagtgtcatgcgcgctttatcaaacgaaacagtttgaccggttagtttggcactcgccgtttctaataatgtctgatctttttgtcggctggctaaataataaccatccattcggcgcttggagagtttcttcactgaaatttgatcgtcttttaaatccttcataatctggctagtctgtgaaccactagtaatcgccgtcgacgttattgtctgactgcctttcagcgaggcaaataaatagatatccagcgcaataaaaatggcgataaaaatcatttcaattctgcgaaaatccattcatctaactcccttcggttaattcagctttttgcgccatcaatgcggataagctacgccaaacccctttatactgtacaaagtaggttggatttaaatcaatcacttgttcgttactggtttctttggtccattcataaccgacttgcacgttttccacattttctagcaagaaaccattacttgtcaattgattcaaaacagactcggtacttggcaatgtgacttgcttgtcttcagcaggaacgggtacttgcaaactataatttgaaaaatcaatcttttggccagttggtaagaattgtactttcacgctcccaaagttagtctgataaaagactgggaatccttcaacgtaggtccgataagcagtcgaattcgttgctttatcataactatagaaacgcatccctgaaagggcgttacctgtctttaaaagcgcatcaaaactggcttcaaaactctttgttaatgtgcttggtgatttctcattttcatacttcacaaacgaaatttcaccggtatcatggttgatcgttaggcgtttatacaaattgctgtccgtcccatccgtataaatcgcactattgccttgttctttcgtatcaatattatccgtattttgttgattcaacagcgttgtgatgtaataattttcgggttgttgattaactaaataactataaggcaacaacgtttgatccgctgccacatagagtaatggcttgtgattcaacattttttcggtcactttcaaatgcacatcggcatttttaagcacctttttcacacgagcttgtgaaaaaacattgagtgtcgtttggtacacttgatgactttgatcattcatcaaccacaacttaggctgtgtgcccaacgtgattcgaatccgattgaatgtcacgttttgacctaaattattattctgataactgaagacctttttaaaaatagcgtacgaaatattatcaggatataaaagggtcaatgtatgatcctcactaattgcctggtaataatcgtcttcgcttagcttaacttgcttaaactgtgccgacttggcaagctttaaagtcgctttaaactgtggaatcaaactctcttttgagttataaatcaactgactctgattgtctgtccgccacaatagttgcgtcggcaagaagatatcaccgatttttcgttctgtcttacgacttgttgacttagtggtggtttgactgtccgtttggcgctcataatgcgcgttactggtccagattagccatgatagcccgatactgacgataatggcagcaatcagtataacgcgcattaaaaagttattaaatcgcatcccaatcacctccatcagaatcaattggttcatatggcaacgaaatgtagaatgtcgagcctttaccttcttggctatcaacccaaacacgcccacgatgcgcttcgatcacttctttagaaattgccaagcctaaaccagtcccgccttgtttacgagaacgggccttatcaacccggtagaagcgatcaaagatcttaccaaggtctttccgtggaatccctaatccttgatcagagatgcttaaaatcacgtgacgatgtgtttccaataagcgacacgtaatcacgccaccatctggtgaatatttaatcgcattattcatgatattatcgatcacctgcataaatttatcggtatcaatttcaacccataaatcccgcttagtgaagtctcgtgtaatactgtacttcttattcggatcatctgttggcaatttgcccgtgctggttgtcagtttaggcaaatcatctttatgctcttgatcccgcttgatcatcatatcaaaccgatccagtgcatacccaaagaactcgtttaaattaacatattcgagattcatctttgccgttccttgatccattcgtgacaaactcaatagatcgttgatcattcgaatcatccgatcagtttcttcttgggtcacctttaagaaattgggcgctagctctggatcttgccatgcgccatcattcagcgcttcaatatagctccgcacgcttgttaatggcgtccgcaattcgtgagacacattcgaaacgaattcgcgctgttcttgttcattcttttgttgttcggtgacatcgtggagcacacaaactaaaccggtgatatagccggtttctttttgaattaatgaaaaatcaacatgcaagattaagtcgtgatcttgttgttctgagaaatccaagaccatttcctgttgcgtttctaatagatcgcgcaaagaatattcatcactgattcgtaaaactttaagcaatgactggcccagtaactcatcgcgtgtcacatttaaaaaatcttggccagtttcattgataatcgtgatattgcctcgtcgatcagtcgcaatgaccccatcagtcatatgactgagcacactatcaagtcgccgtcgttccgactctgacgcttcttgcgcctcttcaacccgaactgataagttattgaccgcaatcgcgagttgccccagttcatcttgaccataaatcttaacttgcccagagtaatccccacgcgccatttgaatcgcttgtttcttcatttcatcaattggtcgggtaattgcccgggaaataacaatcgataatgccatccctaataaaccagcgactaaagacgaggttaagaaaatgacggtaatcgacgaaatccccttataaacatcttccatactagcccgaatataaacggcgcccacaacggtattactatccccacttgggttcgtcaatggttggatcactgtataatagctccctagactctcattgtatgccacttcttgttcggtatgcccagagtaaataacctgtttcacccgtgggttacgcgtcttttgaccaacggtactttgattattcaagttcgtgacacctcgaatggtgcccttattatcgacaacttgaatttcggcagaattgcccatatcgccaataatctctttaatattcttgttcgcattaccactattactcagtaactcattactaagttggttttgaatatagggtgtcacttgtaaggattgcttaaaatcacgcacattctgatattccagttgcttcacaaaagaagcgccgataacttccaacgttaccagcagcaacaatacgaacacaatggcaattttaaaatgaatcgattgtagcaaccgaattttcttattcatgcggcaaatttactcctgctcaggatttcttaagtagtaaccaacaccccggcgtgtcactaaccattctgggtggctggggttgtcttcaattttttcacgtaaacggcggaccgtcacatcgactgtccggacatcaccgaagtaatcatacccccaaaccgtttgtaataaatgttcacgggtcatcacttggccgatatgtttggctagataatgtaataattcaaattcacgatgcgttaattcaatcttgtcgccccgttttgacacaatataagcatcaggatggatcgttaaatccccgatgttaatctcgtgattttcttcattcgcttctttatctgattgactcgttgtaccttgccggcgtaagttagccttaactcgcgccactaattctcgatttgagaatggtttcgtcacataatcatcggcaccgagttcgaggccaatcactttatcgatttcagaatctttagccgtcaccataataattggcatatcatgcgatttacgtacttggcgggccacttctagcccatcaatcttcggtaacatcagatctaatagaattaaatctgggacagcctcttcaacttgttgtaaggcttcttcaccatcataagccgtgtagacttcgtaaccctctttggttagattaaatttaacaatgtcagagatcggtttttcatcatcaacgactagtatttttttagccatgtgcggatcctccttgaatgtggatgctttgccttctattatactcattttcagaaggcaattcaaaattaggtcaattcctaccaactggattaacgacattgttaatccctataacgattaattcttacgcgctcagtaactttattcaaaaaaaatacaaataactgtttacaaaagtttgtttaatatgctatgatatttaagtcgtaaggcgagacatcatatgggtggttagctcagctggcagagcaacggactcttaatccgtgggtccagggttcgatcccctgaccacccatcaagtatacatgataagtcgttatagaggtgcttaggcattgatatgacggcttttttatttcttcttagcagattagtattcacagtgaatacgacaaaccgtattcaaaaccgtattcacgtattcaacaaaaatcacgcacggggcatatacataacttactgcaggcggtcatattaatggccgtcttttaatttgggctaacttcattagccaacgatttaagttaaacatagactgttaaaaacatactagcaaccattagcattcatttttattaaatttgtggtttccgtcgtaaatcgcgactgtattcattagataagggggtgcctccagttttggacagacgtttcaaacgggcccaagtttagcttggttgtatttttcgacctagataatatctaggggtaacgtttcgttactccatatgtttctatatcaaaacacatctgctcaagcttgagccaatttatatctaattgagtagcacggaattttccgctgtactcattttattttgacctaatagaacgatctgttatggcaggttatttcatggttcgacaaaccgccctattttagggcctcctttttctaaactaccgtttcggtacctcagattgcttccatgcaattagccgaaaccaaagatggattgggcaacatctcgttaaaatcaacggtatctaaagttaattagggccgaattttcggccgtactgtttctataattggctaagtatctgacgcaccatatcagtgcattagatgctgttgtaatatactaactcatctttaaggagtcatcaattcggtgactccttctttagggcctctaaaatctctaaataaattaatgttaggttttgttaggttttatgtccaacaaaaaccaacattattcattctctttagggtgtctgatttgtacggatagaaataaaaaaagggcattttgtctacttttgtctagttatatttaacaccaaaggctaccaccacgggtttaaagctaattcacgtaggtttacattggataaaccaataatggcttgtcctattcaattactaatccataaactagcctgcgaagttttgcgcaacctacttataaacaagcaactcctgattattatagctttcggcaaaagctaataacgccctattcttaaaccgattataactagacctgctataccccatcgtgtccgctatatattgccttgttttatgactaccgtctaagtaacacatattaataatggatgcttgcgtgtcttccattcctcctacaatcgcttggatacactttaaatcacgcttagcctgctcgtgtaagggatgactagtatttactgtggctagccgtctaatcgtgtcatagctctttaacagctttctggcgttgttgatacttgcttgttggtttattcggtcaatgatcatactgcttcgctccttaagtattaattcaattttgatggcatcctaaatcaggactgcatccccgttatcaatgcttcttgaatattaataagccttcactagggtaggactcggcaaactctagcaaagcctgcttcttatgcttcttgaatgatgatgctgttatacctagttcaccgcagatataagccatggttaatttaccagcacttaaatactgcatctttagcaattccctgttaattaccgttagcttacttaaagccacgtctatgtattctagggtctgccgtgcctcgagtgttttaaccgcccgtttctcggttgtattatcactgctaaaagactttggcgcatgatcacaaataggactctttaaatgactggcactacctgcaatatgtttcactcaccaatatcgctttaataatctatctgcttgctgtctgctcttatcctcatcaatatcaaaaagaaacactctgacacctccaacatattaaaaagggatgcactattgccatgtactagcagtaacgcatccctttggttttccaatcaggtattaaactaatttagtcttgtctgttcgttcaatgaacaccaccttattattttgagttgtaacagttaagctcccataacttggtaactgatattctttgctttgctgttgatccgtaataataattttgaccatcatatcacctctaaatatcaatcccaaattcttcagttagttgatgatgtttagcgaattccttgccacggtcgggcgtaatcgtacccaagtgttctggtggcagatcttttagtagtcttcgaatagtagtggtcacactggctgagtttttcttagctgctttgtgcattattaagtatcttgaacaacggtcaaccattgtgaccacacaagatctgccagttttgccagctacagtatccagctcccagtggccaatctgagtccgcttattggcagactcaggtcgttcttggagtgtatgcgatataggaatcttcccgcgacgttcctcataaccttttttatggcgcgatttaccatgatgtctaagctttctgatcacccctctggcacctcgtgatgaaagcttctgatcaaataaaccggagtagatgccacgataaatcgtggtgtagctgatctgaaatgatgaggtctctaattttaagcgtgcggcaatttcttctggtgaccattgtagatccaagaataaatgccggattaattgaagcaattggtgatcagaaagtagcgaccggcgtccacaatgagatttttgagcttcgtagcgctcttgagcaacagaaggtgaatatgccgatctatttcgcgataactcacggctaactgtcgacgttgctcgaccaattgtttgggcaattgaagtcagtgaagcctgattattatgcatcaggaatatcgtttcgcgttcactcatggtaagatgtttgtatgggctcatgattatgtgctcccttcgatggttgtcttcgcaaacaccattttacagggattcatatcatgagtctcttttgttgcacttaaagtataaattcaaggcaataaaaaacgttcaccgcaagtgaacgtttttttgacttacctatttagtttgtgaaacggtgttgcgggcgctaacacgtttgaagacgtggacggcaacccctaaaacggcaccgactaaggcagggactaaccaagctaagccgtagttggcgaatggcaagtatgcctgttcgaagccagtcatcgctttaccgaagctactttggctgacgaccgctggaaaagcagttaccatgtcgaaaaaagcaggaacaacggtaaagagaacaacgaatttatacacgactgggtctttgtggaacagtggtgaagcgactgacaataaaatcaagaccattgatagtgggtataagaacatcaacattggcgttgaccaagcgatgatttgatttaaaccgatattagcggtcaagaatgatgccagagtagttagaactaaccaagtgcggtagctaactttgggaaaatgtttatgaaagtcttgggcaaaagccgcaactaaaccgatcgccgtggttaagcaagtgacggtgatcaaagtggctaagatggcctgaccagcgacgcccatataatgattgacaatttggtcaaaagcgatgccgccattagcggaaactttgaatttacctaaggacatcgcgccaacgaagatcaaaccaacgtagatgacggcgatcattgccattgcgaagacgccggcacgggcagtgaccagcgcaacactgttagcgcgttttttgcctaaggtgcgaacggcggtaactacggtgaccccgaaggctaagccagctagggcgtccatcgtgttataaccttgcaagaaaccattgacgaaagagcctgatgtataagcagcggtggcgtgttgaacaccggcgtggcccattggtgaactaaaagctaagaagaaaacgccagctaataagactaagaaaactggatttaataacttaccgatattgttgacgattttattttcctctaatgagaaaaagagggctaagccgaagaaaacagcggagaaaactaataaaccaactgtttggaaattctttggtactagtggcgctaagccaaccgtgtaggaaacggtggctgtccgtggtgtaccaaaaagtgggccgatggtgccgtggatcaagatcatgaataagagcgcgaatacgggacctaaaggccgcccaacatcatagacaccttcggaacgagtgatactgattgctaaaacggataataatggtaataacacaccagtgactaagaagccaagcgcggcaggcacccaattctgtcccgctaactggcctaaatgtaatggaaaaatcaagttaccagcaccaaagaatagaccaaaaagcattgaactaaccacgaaataatcgcgtttagtgagtttacgttcctctaacataagcagcactccttaaattttgtaggtttgtggaaatgtggttcaaagactaagcgtctgttgccccacgtttaaatcatgagtgttgccattgctaagtcgactttagtaatggcggcgatcatcctgcgcgggaatgatcacgataaacaaaaaacgtccaaacctgaaaaattaatttcagataaggacgttaataaacgtgttaccaccttgatttgccattttctcacgaaaacagcctcttcgggtacaagcaccgattggtacgaaataccctagctcgataatgggagcccccaatgaacgctcaaacttcgcatccatcgctcaaagatgattttctaattgtcgcaccttgacgtccttgcaccaaacgacgctcgcttaactggtgaatacaattatacttttcttatcacagcgtttaattttctcattgatttatcatgtggctataatttaacgcgattttaagtgtttgtcaagggggtgataaaaataaatttataatttaaggcagtagtccatattgaattaacgtgtcaatgctatctaatacgatggtcgtattatcaaaatgtggctgccattttaggatatcttgcgctttttaggtactcaactgacgattgacgtgcactaataaattgccttcgcgggcggtctggttgaacaaagcagcgctgcttaaaagcaagttcggcatcgttttagtgggaatgttttgggcaatttgcggtcgtttttggcgaatcagtgctgctatctctggtagtgatatctgaccagcagcactagccagaaaacgttgcccgccagcgtgaggtgcggtcagcgcacgaatgtataagtcagcaacatcgcgcacatcgatcagattgagtgggatattgggaatcattttgggacgaccgttaagtaaatttttcaaaagatcgaagctgccagaaacgtgggcgtctaatgctgggcccataatcgccaccggattgatcgtagtcagttctaaactgccgtgactttgttcaataaactgccagacagcctgttcggcgatcagtttgaatttttcataggccgataagcctttttcgttaggatcagtccaatcggcttcagtggtgatgctcgtttggtcgtgattactgaagccgatggcgccaaagttggcggtcatgacaacacgcttgacgtgggcctgttgggcggcctttaaaatgcgtaaaataccctcggtggcagttgtgtcgctgttcgggtcattggaaaaaacgggtgatgctacacttagcacgtagtcgatgttctgcatggctgtcgcccagccagcatcttgagtgagatcagcggcgaaaaaacttaaattttcgcggtgttgcgcctgattttcttttagggcggtgcggacggtggtttgtttgtcgagttggcgtaaggtggcacggacgtgataaccttgatttaaaagttgtaagataatgtgcagacccagataaccgttgccgccggtaactaatacgttttttgtcatgatattatgctcctattccctaatatggatcctaatgaacacttggaacaatacacgttatttcgagtattagcctttactggtgttaggtgtggcgagtgcttagccctaacttgggatgacttagacacacaaaaaggcaccttgagtattaacaaaacgttaactcaaggtgctggcggtaaacagattatccaagcgactaagaccaagaaaggtaaccgactaatctcacttgataaacaaaccctattctatttacgtaaatggcagatggaccaaaagcggatatatttcatgctgggctttaacacatcccaacctagccagctaatctttgcaacaactaagaatacctttaaatcactaaacacgccctctaaatggcttagacggctaacagatggtactagcctaccaaagataacagttcacggctttaggcacactcacgcatcggctttattctctgctggcacatccatcaaagaggttcaagaaagactaggtcacgaggacgcccaaacgactctcaatatttatactcatgttactaatagccaaaataaagaggccgtccaaaagctggttaatttcttagatttctaacaaaccgtattcaaagacgtattcacatcataaaaactatgtaataaaacccctataactactggtatactggcattttaacgtggaacaggctcaaacccctgaccacccatcaagtatacatgataagtgataataaaaacgcaattgcgtttttattatcactttttttatttttaacttaaaaaaccatccatcaatgatgtatgatttctagactactctttaagttctcccccgtagccaacatccttatattgtttcatcaactttaatatctgcttactattcttttgatcatgactatacggctgcgtctgtgtccgatgatcgtacagctttaccttgccgccttttcgatcagctaagtagatatccttttccatcagattaatctcatgataggcatcctctgggatctcaaatgcgactgttttattaccaaaaggactccgcgtcttctccccataaatctggatattttgcttcccattagagagattataagttccttctttactctctaaaggtccgaagatgccacctgacgaactggcagaggtcggcttcaattcaccatatacatttaaaacaaggtgcccggccttcttttcaaaaaaagtattgttaatctttaaatctgataattgcatttcagttggtcggttcaaccatgcattaacgcccaaaaaaactaaaacgaagatgccaatcgcaccaacatatttcaaactggttttgagtacccgataaattttatttttcattaacacactctccttcaatttcgaatcattgcctagtagataatcaatgcttacgccaaacaaactactgatagccattaatttatcgatatctggataactcacttcattttcccatttggaaacagtctgccttgaaataaataattgatcggccaagtcttgttgtgacagatgttgcgctaatcgattcctctttaattctgctgcaaaactcactttgccacctcctcaataattgcatcatagcttacaattaacaaaataacgcgcaccaaataagtgccccacgtttaaaactagctatttcctgctttgcaagcaccacttgcttttcattctgacaatctaccgttatgctagagctaatcatttagggaggtttaaccattatgcttgctaccattttaaaagaacgccgactggcactgaacttaacccaacaagccgttgctgaccaattgcacaccacgcggcaaacaatttccaattgggaaaccggtaagaactatccggatgtccccatgttaattgccatcagtgaactttattctctaacaattgacgacatgctcaaggctgacgatgattatgtccaacaagtctctgatgactatcaactgattaaacaaatcaaacaatcccacgttgttgattggggattaggactctcattagggacattacttgtgattttaatcgtccacgcctttttccctgcagtcttaaccgaatcaatgtctgggctattaactttaagcgttgcggttgttttgattggcttcagttacttcaaaacacgccaattttatccaattataccgcatgctaaacagcccttaattatccctaagccaattggggtcggcttaacgattaaccagaatcacccactcggaaaagtcatttgggtattgattattctattcttagtaggtggcctcattccaatgattttcaaataaaaaacgtcatccaatagatgacgtttttatgtttatgcgtatagagccttttgattatatttaacatattgtttaccaaagctaacaaccattcctgatatcttcttagcgactggataaagcacaagcccaataatgaataatgccagacatgaaatcaattggaataccataaagcacactaagtgtttttaaaacatgaacgtttggtaatgttttatcttgctcccatctagaaaccatttgacgtgtaacaaacaatttctgtgcaacttgttcctgcgtcaccccaacattcatcctagcttcctttaaagcattcccaactgacattttgccacctccgctataaacctaatttaacgaattaacccccacaaaaacaagcaacaaatctgttgcatccctgatattaaagcatttcaactcactggcagtcttttatttcccgggttaattcccgaaaacagctaacattttctttgttgccttttgggtcttcacgagttcaccttgaatacaccatctgcggaccgttttatcacaggtaatcaatgtcaccattttacgacctggtacatcatcgatgacttttacgtcgtatggactgattgaagctttgtaatcaactttgtacgtgtagactttttccatatccgttaagtagaccttatcgctgacgcgcacattttcaagtggcagaaagatgttttggaaagaatgccctgctaaagcataattgttaactgcacccatttgctgatcaggtttcattgtgcctccaccttgagccattgtgtcctctgagacgcctttcatgactggcaaggccatcttgacacttggaattgcaacttttcctaagacaatcacatcgcctttaatagcggcattcacaatctgttttgtatcgagtgaatcaaccttatcaaaatcaaagctcgcttttttatgttggtttttcttaatttgagcagctgtgacgtccatctgacgatgcgccatcattttaaccagttggttgcggattggattgatgaagaccaacactaatccaaccactaacagaatggctaataagccattaattaatcggtttcttgtctttttttgcataacagtttaaacccttcactagtatttacgactattgtaacacactattttatatttaccggctctaaatccttgtgattcgcaattaataacagcaacacataaaaacgcacaaccgaaactttcggctgtgcgtttgttgtttattttacgtttaagatgtacataaagaccacgaaaacaaagaataaaacatacataattggatgaatttctttgcgacgaccagctgtaatcattgtgattggatagacgataaagcccaatgcaatcccgtcagaaatactgtaagtcagtggcatgcctagaacgattaagaaggcaggaattgcaatttctaatttttcccagtcaattttcttcaatgattgagccattaaaacaccgacaatcactaatgcgggggccgtcacttgtgacgtgacaaccgtcaataatggtgagaagaataaactgaagacgaataacacacccgtcacaacggccgttaaaccagttcgaccaccaacagcaatcccagcggacgattcgacaaaggccccaactggtgatgttccgagtaatgacccagctaacatggccgttgaatctgataccaaagctttcccaacgcgaggcatcttgttatctttcatgaagccggcttgttcagctaaaccgaccaatgtcccggcggtatcaaagaaggtcactaataagaaagtgagtacaacgacccacatttgaacggtgttgatatcgccaatgtgatttaaaccagctaagaaagtgggtttcaaacttggcgcagctgcaacaaagtgtgttggcaacttaattaggccactgatggctcccacaattgaggttagaagcatcccgataaagattgctcctggtactttacggaccattaaaataacggtaatgattaagccgaaaacagttaaccaagtcgtcccttgcgagaagtcccccaaaccaacaacggttgatttgttcgcaacaatcaagccaccaccgtgtaaaccgatgaaagccacaaacatcccaatcccagctgaaatcgctagtttcatattccgcggaatggcatcaataatgatttcccgtagcttaaagacagtaatcaacatgaagattaatgaagccacaaatacacccgctaaggccgtctgccatgacacacccatcccgataaccactgaataactgaaaaaggcattaatccctaaagctggtgcggttgcaattgggtatttagcatataaccccatcaagaaacacccgatcgcacttgctaatgctgtggctgcaaaaacagcccctttatccatccctgaatcacctaaaacgctcgggttaacgaataaaatataaaccattgaaataaatgtggtgaatcctgctaggatttcccgttgcactgttgaatgttgttcttcaatcccgaagaaacgacttactctttccataacgactcctctaaaccaactaattttcccactatctttttagtggtaatgtgtgtataatactgactggtgccaaacccatgagaatgaaagtttgttggcgtgtttaacgacacgtttagaaaacgaactttgcattctctttttttgtactctttttcagcaatacctaccagatagcagataagacatttgtttgttcacgatctggaccaacagcaaatgttgctaatggtaaatcaactaattcttgaattcgttcaacatagtgccgcgcattagctggcaagtcttctagcgtcttagcacccgtgatatcttcatcccaaccaggtaattcttcataaatcggtgtgcaacgttctaattcgcggagacttgctggataacgatcgatttgttcgccatctaattcgtaagcgacacagatcttcaatgttttaatcccagttaggacatccacacagtttaatgataattgggtcacacccgccactcgttttgaatgccgaagcacaactgagtcgaaccagccaacgcgtcttgggcgaccagtaacagtaccatattcatgaccggcttcacgaatgaagtcgccagtttcatcatctaactgagttgggaatgggccatcaccaacgcgtgaggtataagccttagccaccccaaccacttcgtcaatccgtgaagcaccaactcctgaacctgttgaaacgccgccggcagggtttgatgatgtcacaaatggatacgtaccttggtcgatatccaagaggatgccttgtgcgccttcaaataagacattccccttttgatccaaaacatcattcaaaacaactgaagtatcacaaacatattgtttaatttcttgaccatattgataatattctgcaaacattgtctcatattcaagtggttcagcaccgtagattttagtaaagagcgcatttttttcgtctaagttttgttttaatttagttgcaaagagttccttgtccaataaatcggcaatccgaatcccactccgagcggctttatccatataagctgggccaatcccacgattagtcgtcccaatcttttgatcacccttggctgcttcttgtaagccatccaatttagaatggtatggcaagataacgtgtgcccgatctgatactcttaattgactcacgttgatcccttgatccgttaaatatttcaattcagaaacgagggtcttcggatttacaacgaccccgttgccaatcacgctgagtttgtcactgttaaaaatcccagatggaattaattgtaaatggtaagttgtgtcacccaactgaatggtatgacctgcattgtcgccaccttgataacgcgcgatagcatcagcattttgacctaaaaagtcggtaatcttgcctttaccttcatcgccccactgtgttccaacaactactacagatgtcatataaacatactcctctattcgaatccgtcttcagatccgctatttaaaccctaaaactcacaaaaactattgtagcaacaaattatctcaaaatcaatataaaagacgaactttaaaatctctaatcagcctttattcagtaaaatcttaacgatacatataaccgataaaatacgaacgtaaataacgaacaatgatccctattttgacaggcgttcattaaaaaaatacaatataaccacatctaacaccaaaggagctcatcatgggttacgtcagcaatatcattactgcggcaattgcctttccattcgtcgcaatcatcttaaccgttccactgttagtttaccactatcatcgttatggttcgctaaccatcctgcgtagtgtaattctctacagcttcatgttctacttggtagccgcttactgcttaattattcttcccctccccccacgctcggtggtcgctcatttaaccaccccgcgctataacttagttccctttacgtttgtccgggagtttatcaactcaacccatttcgtttggaccgaaccgagttcatacctcgcaacacttaaacaagcggcaaccattcagccgttgtttaacatctttttaaccgttccatttggcatttatttacgttacttctttaaaacgtctttcaaacagcccttattacttagttttacgttatccctattctttgaactcacgcaactttccggactgtatggtatttatcctcgcccttatcggttatttgatgttgatgacttattgctcaacatctctggcgggctgcttggattttatctccagcccttggtcacctttttcttacccactcgtgaaagtttggatcaagcagcctatgcgcgcggtcaaaaagtgggctacttccggcgcttattggcacttgccgttgattactgtgtgttaggcatcattacatttgcaattgctgttatctggcgattactaaaactacccaccattcattcagaaatgcttcagtactgcctgacaactggtgcttacttcttaatgctccccgttttttggcgtggcaaaacacctggtcaatctctcctgcaactacagattgtcgctgaccatcatcctcgttgggcgatcttctggcgccagctactcctatttttcatcgtcattcccagttttcaactctggcgcgtcaccctggatgccgctgttgctagtggccaacaacattttgacgtctatctctttattatcggtctctcactcttaccaccactgttattcaccggtaacttcttattaagttgggtgactaaacgaccacaattattctacgagaaactaacccatacacgggtcattagtagcattcaccccactcagcaaccttaaaaaagccttaaaatcatctctaattcctaaaaatagttaaaatcggatactttacggcttgaattggctatactaaaggtatcattcgctttgagaaaggattattgcttatgtttaataaattgaagttcctcatccccattgcatttactgctattatcggtctgagcgcacaaccggcctttgccgacagcaccacatcgtgggacaaacccgttgccactcttgggaccagcctttctagcacccaaaaagctgataccctcaagacactggaaaatgccgcgaatgtcacagatgtcagtgaactaacagtgaccggttccacacttgtaaaatatcttgatcaaaatcaacaaacatttaacgccaactcaagtgtctactcaagtgctttaattcaaaaaaatgacagcaataccggcatcaatgttaaaattatcgattttaatggccgtaacaacatcaccacaattacagccaaccaatataaaaatgcggccttaaccgccggcgtcacgaatgcgacaatttacgtgacttccgccattccaatcgatggctctggcgccttagctggtgtttacgccgctttcgctgaaaatggcgattcactcaaccaagcgcaagtaactgctgctcaagacgaaatgagcaccctcagcgatatcacacaggctaataaaggcaccgatggttattcagattcccaattgaataatgccgtcacaggtgccaaaaaagacatggcaagtaagggcaataatctgactgttaaccaaattactaccatcgtcaataatcaactcgaacaaaacaacctcaccaacatcatcaacaataatcaaaaacaacaaatcattaatgttctcgttaaaatccaagattccggtgctttaaattcggatgatttcaagaatcaagccggtaagttaatgaataatatccaaagtggtgcgaaaaacatcttcaataagctcaacacccaaagcaatcggaacttcattcaaaaactctttgatagcatggctaatttcttcaaaggattatttaactaaataacacaaaaaagccccgcaaactgaagtttgcggggctttttatttattcattatttcgttgttgcttttaaggcaactgcatctgcagcaactgtggtactcattgcgttaaacttaatgtaatcaacagcgggcatgttggtaatgatcaccatcattgccgtcttcttaccagcagcagtaatttgattcaaatcaaccgttgctaataagtcgccatgtttgattgtttggccttcttcaacagcgactgcaaaaggtgcgccgtttaattcaaccgtatcaattcccatgtgcactaagacttctaaaccgttcgttgttttaatcccgattgcatgtttcgttgggaacacagtcataacagtcccatcaactggtgcaacaattttgccgtctgttggaatgacagcgtagccatcaccgagcattttttgagcaaaagttggatcatcaacattttcaatatcgatcaattcaccattagcaactgcatagaaaacatctgtttcacctgagttaatatcgctatcaacaggtgcttcaactggtgcggcagcttgttctggtgtacttgttgcgattggcgtattgtggttataaagttcttttaaagcatcagcaacaaattggacttctgtcccaataataatttgaatgtttgttttatctaaaacgttaatcccagcagtaccaacagctttaatcgctgattggttaacattggcagtgtcttctaattgtaatcgaagacgtgttgtacagttgtcaatcactttgatattgtctttgccaccgattgcagcgtagatccgttttgcttgaaccatgaatttatcatcagtagcgtctgtttcaacgccagcagtatcttcatcaacagcatcttctgcttcacgacctggtgtcatcaagttaaacttcttgatggcaaagttgaacccaaagtagtaaataactgccatgaccaacccttcaaccaataacatcaacggttggttagcaactgggtttttcaaacttaaaacataatcgactaatccagcactaaatgcgaaaccggctgtccagtggaagaaagcagcaacagccaatgaaatccctgtgaaagctgcatgcaatacataaagtggccatgcaacaaacatgaatgagaattcaagtggttctgtcacccctgtaaagaatgacgcaaaaccagcagctaacatcaatgaagctgttgctttacggcgttctggacgagcatttttgtagattgcgtaagccccagcaggtaagccgaacatcatgactgggaagaaaccagcttgatacatccctgtcttaccaatcacagctgaaccattcgcaagtgatttcgcaccacccaagaaattcccgatatcattaatgttagcaacatcaaaccagaacacagagttcaaggcatggtgtaatccggttggaattaataaacggttgaaaaagccgtatagaccggcaccaaaccaacccaatttagaaattgcttcaccaaatgacactaatactgtaaagacggctggccaaacaaagtacaagatagctgaaacaaccatcattgcagttgccgccataattggcactaaacgtttcccactaaagaatgagagggccattggcaacttcacgttgtggaagcgattatacattgcagccgcaattaagccggcaataatcccgattaaaacattcccttcaatcttaccaaaagctgggtttactttagcgatgtctgataaaccttgcatcgcttgaattgaagcaggtgccaagattgtcttaggcactaagaaagcgactaaaccagcaagtgcagctgcaccatcttgatccttagacatcccgagtgctaaaccaacggcgaataataatggcaagttatttaaaattgcaccgccaccggctgataagaaaattgtaaagacgtttgcgtttgaatcgccattgccaacccagttcgcaatccccattaaaattgcggctgctggtaaaacagcaactggcaacattaatgaacgacccattcgttgtaagtaattcttcataagtttttctccattcatttttttcgttaatatgattaaatcattaatgtaaacgataagcaagcgcttaacaaccggtatagacctttataaatagcggttgaagcggtttcatgcacacaaaaaatattggtctatacctaaaagttaacaaatgatatctgattcaccaaataaaacggttgcattcacctaccacactctctatactgagggtacaaattaatcgctttgcactaggggtgttcttagaagaactgagataggtttgtacagcctgatccctttgaacctgtaagttcagacttgcgtaggaaagtgcctttctttagactactcacaccacttttctatgcattcgtgcatcgttaagtggtttttttagtttttaagggaggtttttatatggttgtttcactgttagaaaaagttagagcgctcaatccaatcgttgctaatgtcgcaaatggcgtcacaattgatcaggtcgccaacgcacaaaatgcaatcggtgcctcaccaattatgtctaatgcaccagaagaagcggaaggaattgttaccatcgcacaagccattacgattaatattggtagtttgtgggcaccacagattcaagaaatgatggccctaatgaccgccgcttatcaacaacaaaaacccgttgttcttgatccagtggcagttggctcactggcctaccgccagcaaattatcgagcaactattaatacttgacacaccaactctcattcgtggtaatgcaggtgaaattgcttattttgctgggatagattggcaagcaaatggcatcgacgccgggcatggaaatagcgatccagtcattattgctaaggccgcggccaatcgtttacacaccataattttattaacgggtccgaccgacattattacagacggtcaacgcgttacgctgatttcaaatggtacctcactttttcaaacacatgttggttcaggtgatatgttatcgggtctctgtggtgcatttgttgcagttcatcctgcagatccctaccaagccgctatcgaagcagccgccacatttgccgttgccggcgaactagtagccacagcaatggaaacaccgctacctgggaccttctatccccaattaatcgattatttattccacattaccccagccaaagtagcaaataccgtccaactaagtgaggtgcctactcatgaatgaattcccacaagctctaaccatcgtcggttctgacagcggtggtggtgctggtatgcaagctgatattaaaactatccaagagcgccatgtttttgcaaccaatgtagttgtcgcaatcaccgctcagaatacgcttggcgttcaagccagtctgccactaccactatcactaatcaatcaacaattcgcttcattggctactgactttaaaattcgtgcctgcaaaacgggaatgttggcagatgctgaacatgttgcaacggtcgctggaaatctacgccattatgattgggggccgctcacccttgatcctgtaatgattgccaagggcggtgcacagctacttgccgacgatgccatcgataccctacgtactgaattattgccgctagccacagtgctgacacccaacttacccgaaaccgaagttctcacgggcagccgcataaagacaacagctgatttcaaacaagcggcccaccaactccaacaaatgggcgccaagaatatcattatcaaaggggccatttagactatcaatcacaagccgccgattacgtcctctacgctgatggacaagatgaatggttaactacaccacgaattgctactaaacgaacacatggcactggagatacgttttcagcttgtttaaccgccgagctagctaagggcacccctttgaaagcagcaattcatattagcaaagcctttatccaagccgcaattgctaatccgattgctgttggtcacggccacggaccaaccaatcactgggcttatcaggaggttcatcatgactaacatttcccgggaaatgttccaaacttatttggtagcgggtacccaaaataccggtatggatgattttctaaacattctcgaacaagcactacaagccggcattacctgtttccaattccgtgaaaaaggtgctggtagtctgcaagattccgatgcgattttaaagtatgcgacagcggctcaagccctttgccgccattatcaagtcccatttattatcgatgacaatctcgatttagcacttcaaatcaatgcagatggtattcatgtcggccaaagcgatcacccgtggcataaaattgaaacggccaaagcacacggcttaataactggtctatcttgccacactgaacaagaacttcaccaaagtcataatcaaccgatacttgattacattggcattggtccaatttttccaaccaattccaaagaagatgctaaaccagcacttggcactaatcgcttgcgtttcttaacgcagcaaagtgaactaccggttgttgcgattggtggtatcaaccaagaaaacgttgctcaagtcgcaaagactaccgtggatggagttgccgttatctcagcaatcacccacgccacagatatcgctcaagccgtccaagcattacaaaagccatggcaccgcagtactgatgaaaaccaatcgtaattaacccttattacggtttgacccattctgaatagtatttgctgccagtttgatccaccaaacatttaaaaaagccgctagaaccctttttatagagtactagcggctttttcttggtaatttgctgatatttagcttagtgctttgttagtgatgactactccatttaacactactcggtaaacttattcattagcaagggcttcaaaataacttgctttttgctgcgcccagtaggcctcttctgcctcatcaatcggccggagtacccgacatggattaccaactgcaatcacgttatcaggaatgtctttagtcacaactgatccagaaccaatcaccacattgttcccaattgtcacgcctggattaacaaccgtattgccaccaatccacacatcatccccgatggtgattggcttaccatattccaaatcatcccggcgttcttgtgccgtcgttgggtgaccagctgtgtagagtcctacacgaggtccaaagaaaacgtggttcccaatcgtcactggtgctacatcaataatgatgcaatcgtaattcatatacacatgctcaccaatgcgtgtttggcaaccataatcagttctaaatggtggctcaatatataaatctgagccacttttcgcaaataaagacttggttaattcgcgtcggtaatcttgttgttcttcagtggtttgattaaacaaccgagtaagtacgcgcgcgtgtttcatatcggctcgcaattctgaatcgttcgcccgataaatttgaccattaatcatgcgttttttttctgacatttctttatcccccatcactactaaaataggtgcgtcacaattgtggcgcacctttttaatttaccaaattgcaacccgtttagcgggtgctaagtacatctgatcagctttcgttacattaaatgtctcgtaaaaggctgccaagttttggacctgaatattggcccgcaacgcgtttggtgcatgaacatcaatatttaacaataattgttgatattgctttgtagctttcatccgccaaatcgttgcccaattgacaaagaaggctgccaaatcaacatcaggttcttctttggctgcttcaagggcacaactcaagccacccgcatcggcaatgttttccgagacagttaatttcccgttaactgttgcgcctgcatattctaggccatcaaattctgcaatcatttcttccgaaagtgtcttgaagtgagctaaatctgattcttgccaccaattatgcatgttgccatactcgtcgaattgcgcaccgttattatcaaaagcatgtgagatttcatgtgcaatcactgcaccaatcccaccgtagttagcactgctactttgttctaaactgtaaaaaggtgcttgcaaaatagccgcgggaaagacaatgatattcttcgaaggtgaataataggcattaactgtggcagcgcccatttcccacttattacgatccaccggttgagtaagtttcgcaaaattttccgtttcaatcgttcgaataaagtcagctgtattttcaaataatgtcccatcttctgctttaggtactgtgaccaacttcgcaaaaataggggcaatctgatccgggtaaccgacatgaatcccaaggtggttgagttttacaatcgcttgttggcgtgttttttcggttagccagtcatttttttcaaggcgtttttgataaacaccaatcattttttggaccatcttttggacgtcggccttggctgcttcaccgaagtattgccgaccgtaataatcgccaacaacttgattgaacatccctaaggcaaggtagtaagcactcttttgttgtggacgagcttccttgctaccagataacgcacgactatagagcgaactaatttggcgtgcctcttcattcagataaccgctccaactacgaactgtcatgactaacagccacgctttgaacgtttcgaaattggcgtctgtcacaagctgactcagttgcgcaaaatacttcggttccgtcacgataattttttccggttgaacaggtagcaccttgctaaataaacgtggaaaatcaagcgtcgtttgttgttgcataaaatcactcaaaggctgtggattatagagtttcgtgtaatccgctgcttcttcggcactcttcacataaggtgccagtgaccgatcaaatgccaacgctaatttgaccgtcttcgttgcatcaacgggcgcaatcccaattttctgcaagagctgaaccatcatatccgtaaagacggccaataaatggtcagcattgggattgtcagcttcataataggtcttatctggcaaaattaagtcgctagcttccgcatacaacgcgtgatgggctgtgtctttcatgtcagcatcgacagataagccaaatggtgttggtaacccggaaagtacccaatcagctaacccacgattgtaagttgctaaactatcgagagattgcacccgggctaccattggtaggatcggtttcataccgagtgcatcccgcgtttgaaagtccgcagctagttcgtaataatctagaaaatgttgtaacaatgcgttctttgcggtcgacatcttagcaaaatcagccattaattgctgatcaatctcatcaaccaaggcgacaaagccgcctgttgctggtttatccgctggaatttcagccgtttttaaccattcttgattcaccgccgtataaaaatcatcttgcattcgcacgtttgtcatcattgtcctcctcaaaagcagattctttcccaattttaacattttgccactttttccgttaatgctttgaccccataattgcaaaaaagccgcaatttagcggctatttcgttggtaattgtttttcaacttgataatttgaatcttggttaagtttaaacgtcttcttcaaaccgtttgatagatagattttattatcttttgtgatcatgatggcttggatattcttcggtttgttgttgatgagctgcatgccttcgacaatccccttattaaagacagcatttgaaagggcatctccatctactgatttaggcgagataattgtgacactcgctaggttattttcatatgggtagccagtatggcgatcaaagagataaatgtaagtatgcccgtctttttttagataatgttcataaatccctgccgtaacaaccgaaatatcacggcctttaatcgtaccgactgattctccacgcgcctttttcggatcttgaatgccgaccgtccatggtttgttcttccctaatggtgaatgccccataacaatcacattcccacctaaatcaataacggctgatgtcacaccattttccttaaaaacttgtttaacttgatcggcaatgtaccccttagcaatcccgccaaaatcaagtcgcatgccttttttcttaaggtaaactgtacgtttggccttattcaaaacaacgtcatgataatcgactaatggtaacgcttggtcaatttctgcttgtgctggcacccgcgcgcctggtaacccaatttgccataaatctgtgattgcaccaatggccatatcaaacgcgccatccgattcttgactataatgtaacgctttttccattagtggccacatatctttgctaacctgtacagatttaacaccggcattatcattaatcttatccaattcggaacctgatttggttaacgttgcttgattttcggactttttaatccgcgcaaaagccttatctagcacggcttccttgtctttattatagattcgcaatgtacaaatcgttccgagatagtaatcacttttttcatagggctttttgaccaacgtttctttgtccgctggcttactttgacagcctgccaataccagtgtcacccctaagagtgccaatccgaattttacccatcgtttttgcatcgttcaatcgctctccttgctactaaaatcacatggctctatcataccatgaatccgctttaattggttgtaaaaatcttctactggcgcgattctttgagttgctgataggtggcaattaatgctttaaaaacacctttatccgaataaactaaaatattcatgcgatagataattaatgctaaataagtcagtccaattagtgtcgccatggctatgaagagtcccatgctagccccgaacgcgccaacatcaccgtttgccagccgcacaggtaacataatctgtgaaaacaatggcacatagctcaccgcccgcaataatggaatatcggtctgtgatgccagtaaaaagccacccaaataacttaatgtgcccagtaaaatcaatggcgaaatggcttgttgtacctgatccattcgagacacaacagcgcctaacattgcagctaatacggtgtagagtaataccccaataattaaaaagactcctgcataccacattgctggcgcaaccaaagcacgacgaataatcggcaataactctgctaacggtagttgctgtttcaaaaactgaaacccgacaatcccaactaaaatatagacagtaatttgggtgagtaatagggctaatatcgcggcaatcttcgcgaaaaattgaatttcaatcgaaacacttgatagaatgatttccatgattcgcgaccctttttcagtcgcaatttcttgggcaatcattccagcataattcacgataaagatgaacattaagaccgtaattccaattgaaataatttggcccacttctttagtgttttcctgggaaatcttttcatgactattctggtaattaaccgtcactggtgcaatgacagttggcgtcatcaatttctggatctgttcaggtgcaacgcctgcttgttgcgccaaagctactaaatgaatctgatttaactgattctctaagacactcgcatcaaatgatggactatcttttcgttcatagtagcgactgattgtctgtcctttttcctcactcaacaacaaatagccatcaattcgctctttctggagcgctttggtggcttgttcccgagtcgtaatctgctgattgatttgatatattttaccttttaactgctgtaattcactctgttctgctggttgcggcgccaaaacagcaattctaacgggttctttgctatgatccatcaagtgactcacaccaaacgtaatcccgaacatcacaattggcattaaaatcatgattagatacgctggacttttaatattctttagaaatacttgtttaaaaatcaccttaaacttaaacatggccttcctccactttcattctaaagatttcatcgagcgttggtgcttgttgactaaactctaggatatagccattttgtgtcgctaagtcgaaaatcgttttaccaaccgtttcgtctgccaaagttaattcaaaccgctgcccgtgctgtgttacacgtgaaacaccgttgatatttgctaaagtttcgcgtgctaacggtgcttctaagaataattgcgttcggccaaactgattccgaatttcatcgattgtaccggcgagcaccacttgcccatcgcgcaacatcacaattcggtcactaatccgcgcaacattcgtcatatcatgactcgaaaaaatgattgctgaaccttgttctttaagccataaaataccttcttctaatagttctgcattcactggatcgagtccactaaagggttcatcaagaataatgagttccggttgatggatcaaagtcgcaatcaactgcactttttgttgatttccctttgaaagatccttgattttatcagtccgcttacctttcaccccgaagcgcaccaaccactcatcaatctgtggtttgatgtctgcgatgctgcgcccacgaagctgtgcaaagtacaaaatttgttgttccacggtcatctttagatataatcctcgttcttctggcaaatagccaagttggtcataatccgcagcggtaaacgcgcgacctttccagagaatagttcccgtatctggtgccataaaattcaagatcatccgaaaggtcgttgtctttccagctccattttgaccaattaagcctaatatttcgcccgacttaaccgtaaatgaaacatcgtcgaccgctagcatcgttccgaaacttttggataaatgtgataaagtcagcacgtccccaaccccctacttttcattaccttaactataccgtattcatttagaaagcgcattatctctcaatgaaatattaaaattactgattaaatcttaatagttgaaaaatatttgctatactacaattatttattaattaggaggtattattttgtccccaaatcaagccttttttcttactgttattggttgcctgttagctatcagttcatcttattttatcgtgcgtctcaatatgctaaagccaacactcaagcaaaatttcttggaccaatatcctgacacggatgaccaagcttacaaagtgcaacaatcaatgaaacaagcttatttcaacgcatccttttacaagcaagctgttcctttaacatcttggttagtccttttattctttttatcaatcggtggctgtctaacagcgctctatctagatgccctgaacattgcaatccgtcttttggggagtgcattcatttttatcgcgtttctctaccttaagttgccgacttttcaagcacagcatactttttggaaagcctatctacaagcgcatcctgaaaatgaattaaaagtcgtcatactcccactcgattcacccattcaacagcggcggattgccttactcaccaaatttaaatgttgtactcttgtagcaggtctcatattgttttacgcctctctttttctataactcaaaaagcggcaccaaccattttatggttggtgccgcttttttaattaacgaatttcaattgggttcgttggttggtctgattcacttaacttcggtaacattaattgtaagacgccatcttgatattgcgcatcgatttgatcccggttgacactaggtaggtagaattgccggctaaagcgcccataatgccgttcgctttgaacgatattgccttgactgtcactatgatcagcgaaactatcacgtttagcactaatcttcaatgtattatcttgataatccacgtgaatatctttcttgtccagtcctggtaaatcaaccgctaattggtaatccttatcggtctctttaacatctgttttgagtaagttgtccgtttcaggcgacattgccaataattgctgaccgaaattcttgaaccaatcatctccaccaaaattatctagccaattttgacgaccattcattaattcgtttgccatctctaaaacttcctttcttaatctttacaactctattctagtccgttaatcatgaaatgcaagtaattagcattcgacgttgttgagtgccaatttttaaactagaccactgatttttcagctttttgatacccgcctaatatggttttgtgctatacttaaggttccaaaaatattcggaggtaggttcatatgaaaattgttgtcttagcgggcgggcgtagtaccgaacgtaacgtttcattaacgtctggacacaaaattaccaatgcattacaaacgaaaggccatgacgttgctttcgttgatcttttcttaggaaatgatttgcacgacgtcgcatcaatcgatgatctttattcttcaacacctgttgaaaaagattacgacatcagcgacgaagttttaacagacgacgccatcaacgcattacgtactgatggttcaacacaactctttggcccgaatgtcttagagatttgtaaaactgctgatattgtcttcctcgcacttcatggtggcgatggcgaagacggtaaagtccaagcggttctcgatctctttggaattccttataccggtagtgacacactcgcagcaggtattacaatgagtaaaaaggtttcaaaggaaatcttattatataaccaaattccaactgctcggtttgtcgctgcttatcgcgaccaacccatgccagaaatcccatttgagtaccctgtcgtggtaaaaccaagtaacggtggctcaagtgttgggacgcatatcgtgcacaacgaagctgagttacaaccagctgtcgaagatgcacttcgtttcgaccgcgaggctttaatcgaagaattcattaaaggtcgcgaattctcacttggcgtgattaatggtcaaccattacctgccattgaaatcgtcgttaatgacggttggtatgactttgagcacaaattcgtgactggaaataccactcaatttgtcacaccaccaaacgatttacctgatgatgtgcacgaagccatgaaacaaatggcacttgatgctatgcaagcacttggcttaacgaactacgcccgcatcgacttcttctggagtcctgaaaatggcttacacgtgatcgaaggaaatacattacctgggatgacgccactttcattaattccacaagaagcagaagtgcttggtatcagttatcctgatctttgcgaaatgattgttcaaggtaaattagaactccttaaagcaaaatagccaataaaaataaccctgtcgacgattttcagtcgacagggttatttttatttggttcatttaaaactgattacttagttcctgattaggaactattcttaaaaaaacacgtcgattggaattcccaagcggtcatgtagtaattgaatttctttgacggtaaatggaatcttccctctaatcttacgattagccgtcgttaatgttttgcccaatacatcagcaacaacttgctgtttcaaatcatgaccctttaaataacctgatagaacaaataatttttctgccacattcagcacccccaagaaacgttatcaatcccgttccacattaggaatattacgataatgtaagaactctgtcaattaaaaactttagtcccaagtgttcacttattgacgtcatttgtcatataattaaacttataagtcaaacgcgtgataaaggacggtgctaaatgttcggacaattattacacgataagcgaactgctaagaatctaacaatgcaacagctcgccgatctactcagcgcaaaatataataccaagattagtagctcaatgatcttccggtgggaaaaaggcgctgccccatcactaaaagcattatttattgttgctgtcgaattgcaaatcgaccttaaccaattggccacccttgttgcggattctaaccgcgtcaattagccgcttttttttgtttttttcccgatttttgaatggtcttcacacctagtacatctaaaaagaacgtaaagattggtaatccaacaattaacccccaagttcctaagaaacgttctgctacaaataaaacaacaaatgtaaagaaaattggcagctgtgttttactcgacataaatcgcggattcaaaacatatgcttctagggcatgaatgactaaaatcatcaccaatatataaaccacatactgaattccgccgactgaaaaggcgataatgcacaatgggatacatgaaacgatgactcctgcgaccggtaccatcgacaataggaaaatcatgatggctaaactcggaatattaggcattttcattaccgttaacgtaatcgttgttaacactgtattcacaattgcaatgaagatttgggcttcaattaccacgccaaaggtattcacgaattttttagcaaaatacatgatatcttggaagaaccagccgtaagtactcttcaaaaagagttttccaaactgcggtaatcggtctagctcaattgtgtaaaagaaactcaaaataaacgataagacaattgtgacgcccattgttccgattccggtgatgtaattaacgattgttgatacaccgtgtttcaactgatccgtcaagttgaactgtttcatgtaatccccaatggttcgcataaattgattcgcatcaaatgatggactttggtagaaattatagacactctcgcctaatttaattgactgtttagcaatctgtggcacataaatcgttactgctagatacactaaaaaaatcaccaacatataaagcggcacaaccacagctgcgggcggaatttttgaatactgttggacctttcgtactaattgagtcactaaaaaagtaaagatgaacgtcagcaaaatgatattcatcatcgagcgtgacacatagatgaccccaatcaacgttaagagcactacaactcgtcttaactgctgattcgtcacaaatttttgatataaactcacgcaatttcctcctatggcaattctatatcattattttacaacacttcgaactaattggatattctggaattccgatagttgcaacttacatctttttaaaaatagtcgtatactactctggtacttcaaatttacacctagaaaggattttcggtatgttagaaaaaactttttataagaaactactacaacactcttttgatttccctgttaccgtcaactattgggacggcagctccgaaacctatggttctggagagcctgaagtagcgattacttttaaaaaagcgattcccatcaaacaattgtccagcaacgcatcattagccctcggcgaagcgtacatggctggcgaccttgaagtgacaagtaatacaacagataccccacttcaaaaactattaacggcggcttacactagcgcagacagtttcatgcgtaatagtcgctacattcatctgattccaaaacaatcgcattcagaaaaggcaagtaaaaaagatatccaaagtcattacgatttagggaatgacttctaccaactttggttggataaaacaatgacttactcatgtgcttattttgaaaaaccaactgatgatttagagacagcacaaattaataaagtgcaccatattttacgcaagctcaatccacaacctaaccgaacattgctcgacatcggctgtggttggggcaccctcatgttaaccgccgctaaagaatatcatctcaaagtggtcgggattaccttgagtcaggaacaatatgatttcgttcaacaacggattaatgacgagggccttagcgatgttgctagcgtccaacttgttgactatcgcgaactcaaacacgccccattcgattacattaccagtgttgggatgtttgaacacgttggtgaagaaaatcttggtgcctacttccaagatatcgctgactacctcactgatgatggggttgccctccttcatgggattacccgtcaacaaggcggtgcgcgcaatgcctggattaataagtatattttcccaggtggctatgtacccggtttagttgaaaatacacaacacattatcaatgccggactacaaattgccgacatggaacccctccggcgccattatcaaaaaacgctggaaatctggactgctaattttaacgcccaaaaagacgtcattttaccaaaagcaggtccagaatttgtccgcatgtgggatctctatctccaagcatgtgcctcatcgtttgaatctgggaacattgatgtcattcaatacctcgtatcaaaaggccccagcgcaagagacctcccaatgacaagagaatatatgtatgattagagtgctgactgtcgcgcttagtcattgagcattaattcaaaaataacataaatccaggttttaggatttatgttatttttagattaagcggaaattactgcgacaggaagcacgtttagagtgctgagtcgaacgggttggctttgaggattacccaaaaaagacccgctaatcaacaatgattagcgggtctttttttattgccttattttaaaagcgcttctgccttttctctaacttccgcgtcgctcatcttaagatagggtttcattgcctcaacggttttatccgtgttccggccgttggcttccatatagtgatcccacaaagcatcacggacgattgtgttatcgtcactccaatcaaatgcttctgacatcttcatatctaaaaccaatgttttttcaacagctgctgccatattaaaaacctcccatttcttttttacaactctaatgataaacctcttttgaaaaagtgtaccaaaatacgcacttttattttttagagtcctgttagtaggtttaaaatcacgatttggctaatgccaattgccaagacaacatgggttaagatttcaaataataaaatagcatagacgcgatcaaaagctgcccatcgagtttgaaataaactaatcccaaccgcaatgttcaaactgacgtacatcactgcaaccatgattaagacgaaccagatggcggtcatcccgaaacatagagcagccaacagcgcagctaatgctaaaatgacgattatcccactgtacgcactaatctccgttagatacgcgcgcaaggtggttgtcgtcttcttcaataagtaacgcttgagtaaaaagccgattcccaaaacaaccaccagaataaatagttgtccaccgagtgccttcatatcaagcggtaataagtttggccgttggcgcaagacaatttgtgacgccatcaccccagcaaccgcaccaatttgttctgaccaactggcaatgagcaaacttgccgttgcagtattcattaatataaccagaccaaacgtgactaagccaaaccacaggttggcccactgccattgcacctttagcggttgttttaaactccgcgctaaaaattgatagtattgttgcaggagcgatgtttgctgttttgtttgcgttgattggtgcactagaccacaattgggacattggtgcaatttacgcccatatttaatatggcattgtgtacattctatcattcgtctgatctccaaatacttaatttaccgtacaactgtgactgaacatggcgcgtatttcgctaaatagctcgcatgtgtcccgattaaatgtttagatggtttcgtctttgaaccacagatgaccaagtctggttggaaactaggaatcacttcttcaacaatcacgtgtcctggattaccttcatttaaaatcggcgtcacatcttcaaccccgaattctttcgctttttgaacataaacatctagatcggctgcgatttcttctcggcgcccttcaaccacgtttggtgagagtgattgataaatgttcaaatcgccggtttccaaaatgctgacaatccctaatggaatttgataggccttagcaagcgtacaagcatagttaaaggcccgtttggatgaggttgtgtcatcatcatcgatagcaattaataatttttgatagtgcattgattcaacttcgatatttaattggcgtttttctgtcattagttaagactcctcgtttatttaatcaataatgcttctttggcatgaattaattccgtgattaattggttgactgggatcgcaatgtgcttttcggcgcctttgcgtgccacgtaaccatttaagtaatccacttcggttaagcggtgatgttgcactaaatcctggtgcattgaaggataatgaccacctgcttgttctggtgcaaacatcttgctgatgtgggcaatcgtcgtgggaatgtctaattcaacggcttctgttgcagcaaccgctgagaattccgccacaattgaacgcaagagttgttgtgcttgtggggtttggcccaattgtgcaatattacagtctaacaaggcacacaagctgttcagtgtcccattaacgcaggctttacgccagattgaaaagagtacatctgaactatattgcgcatttaagccagccgcactcaacaaggcaactaatgcttgtgccgattctttgccatctggatcaacattttgtaattcgacattcccagagcctgttaatgtaatcgcacctggtcccgttaaccccgccgtccaaagtgtaatgccgacaaaaatattttctttgggcaggtattgttcaatcgtttcgggatgcccgagaccgttcaataaacagactacttttgtcttagcaccgattaagggtttgatggcttgtaacatgtcgactagctgcatcgattttgtgaataaaataatgacgtcttgaacttctttaatatccgttggcaaagcagccggaattcgaacctgaacgggttcgtgccccgcttctacaaccgtcaggccattggtattgattgcttgaacgtgttctgcccaattatcaagtaacacaacatcatttccagctgattgtaacatgtaaccaaaacgactgcccattgcgcctgagccagcgattgcaatttttgtcatagattataaaagctccttttatgatttgaattctttttaatcatgccacatttttaagattttttcacccgtaaccgcttaattcaacttaaaaagaagctgtcaaaccgcttatagcagcctgtcagcttcttaaaataggaatttacgccttcttaaaattaattgatcaatcaataataagaccaagctataaccaagactcattgcccatgataataaaatatcaactagcgaaatgtgtcccaacgtgttgaagagttgcgccatggtcgaaacgggtggcaaaatccccagaatatagaggtagggatgccagtaattgacaatcgcttcacctaaactgccgagaaccaccatcaagatggtcaacgtaccggccatccggcgattcactaaaattcgccgttgccagaacaaaccggtcattactgaaacaggtaaaatactcgtcaacattaaggtcccgcctagccaatcccaccagctaagtcctcgaccaaaagcgtggtgcccattgagcacgtaagtaattgccaagcttcccatcccaattaggacaaagaataatcccaacaagatgagatagctaattaaactgagataaaaacggcgttgcttctttaattttaaaattaaaagtttttccatttgaaggggaaattgattgatgtaactgtaggtcaaccacgtcaataagataaacagtgtcattaataatgtagcgaggctgccgacgaaatcttgtggttgcaccgcataattgactaataaggccactatccaaaatagcaaaggcccccacaaattcccattatcaaaaaccattttctgatgcaaacgtaactgtgcactaaaggacttcataacgtaacccccttaggctaaagccactttttaacattgcttgaattaattcatcactatttttgatatttgcatacaagacgacgtaccgcgtaccatcaacaatttttaaagctaactgttgtaaagtagcgggaagtgcgagtgatcgcggtgtagttgcaaattctaaccgcatcaccttttcttccggctgcggtaattcttcaatcggcaatagccgcatcgcatctagttcataaatttcagtagccaactgttcgattaaaaaagcgttgttagtgccgacaatgatggcgcctcctttttggcggtagtctttcaaccaatgaatcatccgcatctgggtcgttccatcttgaccagccaacggttcatctagcaataaaatatctggggtccgcaaaatcgcctgcacaaagttcactttttgcagactaccgcgtgacaattgatttaacggtgtattaagtgccgccgctaacccaaattcataggctaattcattaatctgaccttctaaatttcgattgctaaactgatctaattctcctagcatccgcaaataagtcttagatgtcagtccatttggagcgagttgttcagccatatagccaatccgcatcttcggtgcaatctccagtgtcccgcgttcaatattcgtcaatcctgctagtacgttaagcaacgtggttttccccgcgccgttttgcccagtaatcgcgatacaagcttgccgatcaatccgtaaattgagacgtttaaaaagttgtcgccgctgatatttttgcgaaaaatcacgtaattctagcactgctcccatttaacttgccaacctttactggattattttgcttgccaattagcgatgttttgcgcagccaaagctaaactcaacacagcatctttagacaaatcagcttggattaagttatgtttaacggttgcagccactgcaccaatgacagccaaaccatatgtcaacacttctaaatcgcgtttaacgagatattgatcttcataaacagcttcgtggctgtattcaaagttgactttgttttcagctaaaacaccatccacgtgggtcaccataatccgatcggtcacatcgattaataatttgtggtcatctgataacgttaatttatgatctgactctgattgataatatgtttcttctgtaatatcaaaatatttaacgaccgggttatttaaaacgccaaaatcatccaaaacagcaaaaattgtttctggatttaattgcactttgcgatcggcaattgctgccatgttttcttctaaccaatctgctaattggcgaacattatcctgtgtcatatgtgggactcctttaattaatctaaatgaattctatccctccataatacaccatccgcaatattagcgcgactgactgcaccaaaaagttactgtgacatcagatgatcatcaattacgccagctccttgtaagaatgaatagatgacgactggtccgacaaattgaaagccccgccgttttaaatccttgctgatttggatcgatagctctgattttgcggggacatccgcccaagttcggggccgatttacaattggctgtccatcaacaaagccccatagatactgatcaaagcttcctgcactcttttgtaacgcaaggacggcttgtgcattattgaccgttgcattcaacttagcacgattgcggataattgccggattggtcagtaactgctcaatttcggttggtgtcatctgcgctactttggcaatttcatagtctttaaatgctgtccgaaaggcagcacgcttatttaatacagtccgccaactcaagccagcctgatacaactccatacataatagttcaaataagcgttggtcatcatgttccggttttccccactctgtttggtaatacgccaataattcaggtgaatcatacatccaatcagcttttgtcattattaccacctcctaaattgaactacgcaaaaaggctaaaaagaattcatcctttttagcctttgggattgttatttattttttcttacttgctttttgataagggcgattttcaacatcagtcttgacgattaacacgtcacagatagctgtgcggttaacatattctgtcacagaacccatcaacatccgttcaactgcattcaagccagtagagcccatcatgattaaatcggtttgatattctgtcgggaagtcacgtgcgataacattcttaggattaccaaaccgcacatgaatctcgacatctttcaaaccgtcattggtttggatatcatattttaaactgttgagataattctgtgcatcttcagagatttggaaaatagcgtctcctgaaagcatgccgctataactccctgcaaattgcttggtatccaaaacgttcaaaatatccaagcgcgcctgattcatcttagcaacccacactgctttatttagtgctaattcagcttcttcagagccgtcaactgggacgagtattcttttatattcttgaaccatgttgttcatctcactttctctatatgcacctgttacactttaagaatataccgcttggaaaaacaattcaagcaaaaaagcgaagcgcttccgcgaacatttaattagaagtagtctttcttttttaaccaccaaccgacacaaaggctaatggctaatgacaatcctaatagcacgagaaaccctaacttactctcggctagcgggaccggtacgttcatcccccagaaaccacctaacgttgtcggaaccgttagaataattgagagtgatgttagtgtcttcataatattattcaatcggtttgaaataatatctgaaagcaaatcacttaactgtgccaataactcacgatacgttgtaatcgccttatcggacttggcaaactgcaagtcaatccgatacagtaagtctgtatgtcctgacacgcgctcaaataatggacttgccttaatttgcggaataatttgctggttactcttaagccctaaatccaaatagacaacactctttttaagagacttgagtgcatacaacaaccgattgcgtgtcgaaacatgtacattttcttccaattgttcaatctgttgcgcaacgaccgctaaagccgctaaataacgttgatagatggccgaaacactctttagagcaaccgtttcaatttgaccatccaggccttctaacgtgagtatttcatcgatgagctcggactgttgatgccccacagttaataacgtctggccactaatgattaacgaaaaaggccgcgtaatatattccgcatgatcttctgaatcatgggttttaactggtaccagtaaacaaatatgggtcaatacttcaccggtgtccgttgtaaatgtttcataccgtgcgacttcattgatatcttgggccacctcaaataacaccgctggtaagtggtattttttagcgaaatggtgcatctcatgtttagttggtgcttcaaaatgaatccagtcggcacttttttcagaggttccttcaaccaactggccctcaggtgtcatttcaaaatacgtaatcatctgctcactccactcttaatacccctatcatactgtttctccccacatactgacaagttaagttgattgcccattaaatatgctacaatattggtatcattggataaggagttgacgcatatgacacaccgcattttgccacttgaaaaaggccataactttagagaattgggcggctatcaaacaaaagacggccggacccttaaatggcataaagtcttacgttccgctagtctagcccacctaacaccacatgatttagcttatttaactgattatggcgtgcgctatgatgttgattttcgctcacctgaagaaattgccaagtcaccagacaaggtccctgccaatgcaatctatgaatccttacccgttttcaaaattgatgaaacggctagtacggcatcagaagctgatctttttaaaacgttcagtgctgatccaaaaagtggtcatgaacatatgattcaagtctatgtcgacttaattaaccaagatcactccaagcaagcttaccggcaatttttcgacttgttgctagcaaacgataaggaggaccaatccttactgtttcactgcacggctggtaaagatcgtactgggatgggcgctgttttcttgttgagtgcactcggtgttccagaagaaacgattcgcacagattacttattaacgaatcaagcttctgccgctttcgtgacccaatcgcttgcaaaactacaacaaaaaacacagaaccagtctgtgttcaaaagttatcagtcattactaacggttcatcaagattacctcgataccgccaaacaagcgattgaatccgaaaatggttcgttgcaagactatttatcacacgatctccagttaagccaacacaacttagctgacctgcgcaaaatttatttagcataacccatttgtttcacatgaaacttaaaaaaggagcgtggctttgaatgcccactttaaaagaacaagtgattgaggcgagcaaaaccatcggcatcgataagattggtttcacatcggcagcgccttttgattatttagaagcaagtcttaaggaacaaaaagcaaatggtcattcgactggattcgaacataaagtgcttgaagaacgcctttatccagatttaattttcgaccaacctaaatcgattatcgcgattgctcttgcctatccaacaaaaatcatcaataagccagcgcgaactggtgctaaacgcggtagttttgcccgcgcttcgtgggggattgactaccacgatattctgcgcgataagatggaccagctgatcagcgctatcgaaacacttgctgattcagatactgaaattacttttaagccaatggttgatacaggcgaactgagcgatgtggctgttgcgcaacgtgctgggttgggcttcatcggtttgaatggtttattaattacacccgaattcggttcttatgtctatcttggtgaaatcattaccaacatcccatttgaaccagacacaccgatggccaatcaatgcggcagctgtacgcgctgcatcgattactgtccaccacaggcattaatgggcgatggccgcctcaatgccaagcgttgcttatcctatcaaacacaaaccaaagggttcatgcccgaagaattcagaccaaaaattcgcagtgtcatttacggctgtgatatttgccaacaagtatgtccgtttaataaaggaaaagacttccacttccatcctgatatggagccagatccagaatctgtgatgcccgaattacagcccgtgctaaccattagtaacaagcagttcaaacttcaatttggacaccttgctggttcgtggcgtggcaaaaagccacttcaacgcaatgcgattatcgcactcgccaacgtgaaagaccgcaccgcgattccgaagttactcgaactcatcgatactgatccgcgccctgtcattcgcggcactgctgcttgggcgctcagtcaattagtgcgcgatgtcacgcctgaaattttagactttctagaaacagccgcaaagcgtgaagaagaaccggaagcccaagttgaattcgacaatgcacttcaaattctaaaagaacgttattcagagaggtaggtccaccctagtatgtcagaaagtgctccgcaaaaaacagtccttacgcagccattaatccttttgatggcttttattaccggcgttgccgtctccaatctatattacatccaaccgattcaagcactcgtagcgaccactttccacgttacaagtggtgcggtcgggactgttgcaatgttgacacaggtcggttatgcacttggcttgttgctgattgtcccgtttggtgatgtgatgagccgttaccagctcatattacggatgcttggcttatccttactatccttattagccgcttacctagcacccaatttcattttctttgccttgactggtttgatgattggcctcacctcagtggttcctcaaatcatcattccatatgcagccgtcctcgctcaaccacaaaaacggggcgcagtgctcggcaccattctcagtggtcttctaatgggtgtgctcctatcccgaagctttagcggcattattagtagttacattcattggcgttgggtgtatctcatcgctacaattgcgattgcgcttttaatccttctggcaaccctcaaattacctaaggattcccgtccaaaaaacgggccaagctactggcagacaatcagttcaattccagggcttatcgcgcaccagcggctgttacgggaagccgccatcaacggttttttcatgtttgggacacttagtattttctggtcgacactcattttctatatggccagtcccgcctatcgtctcggtagtggtaccgttggtctattagcaatccttggtgcggctggtgctttagctgcaccaattatcggtcgcttagccgatgctaaatcacctcgctttattatcgccactggcttattcatgatgaccatcagttatcttttattcttattctgggggcatttcatgccgattctaatgctcgggattgttttattagatgtcggaaaccagtgcggtcaggttgccaatcaaacccgggtccaaatgcttggtgaagccactagtagtcgcaacaataccggcttcatgtttgcctatttcatgggtggtgcttccggttcattctttggcgccctcgcttggagcttcggtggctgggtcgccgtttgtctcttagcgttagcttatcaatgtctcgctttaatcgcccactttattctttatcgtcctaaatcaacaggttaattaatggccggtgtaacgttctcaattccgttacaccggctttttgatacctatcagtaaggcgtattcattgacagttgcatgttacgtatctaacatagttattatatagcaataaatttccaatcatcacaataggaggttccttatgacacattatctaacgtttgatcacgtttcaaagctctatcgcggtggtaacaaagccgttgatgacatcagttttactgtcgacaaaggcgaattcatttgtttgattgggacgtctggttctgggaaaacaacaaccatgcggatgattaatcgcatgattaacccaaccaaaggaacgattaccttagatggtgaaaatctcgctaatgtagaccccgttaaattgcggcgaaaaattggttacgtcattcaaaatattggcttaatgccacacatgactattcaagataacatcacaattgtccctaaactcttaaaatggtccccagaaaaacgccatgcaaaggcgctcgaattactaaaattagtggaaatgcctgcggactttttagaccgttacccaagccaattatcaggtggacaacaacagcgaattggggtgattcgcgcacttgcagctggacaagatattattttgatggacgaaccatttggtgctctcgatccaattacgcgtgaggcacttcaagacttagtaaaacaacttcaatcagaactcggtaaaacaatcgtctttgtcacccatgacatggatgaagcactcaaattagcgtcacgcattgccatcatggataatggccaaatcatccaaatgggaacgcccaatgaaatcttgcgaaatcctgccaaccaattcgtcgaagacttaatcggtcacgatcgtttgatcgaagccaaaccaaatgtcgaaactgttggccaaatcatgcttaaaagtccagtcgctatcacaccaggtaaatcattagttgatgcgattcgcttaatgcgccaacgccgcgttgataccttactggttgtcgacgaaaaccaacatttaaagggactcgtcgatattgaaaatatcgaccatcattacaaagacgcaactagtgttggtgacattatgtctaccaagattagttacgtgaacgaaaatgatttggtccgggataccattgaacggattcttaaacggggctggaaatacgttcccgttaccaacgatgatcatcaacttgttgggattgtcactcggacagccctagtcgatgtcgtttatgatgctgtctggggtgatactgacgaatctgaagcagaatccgaccaacaatagaaagggaggaatcgatgatgctcacttttttaacagaacatggctctgatttactgattaaaacttgggaacaactctacatttccgcaatcgccttagttctgggcataatagttgcggtgccccttggaattgccctcacccgatttcctaaaactgccaaagtagtgattgccattgccagcatgctccagaccgtcccctcattggcactattggctttaatgattccgctctttgggattggcaaagtaccagcaatcatcgccttatttatctactcactactccctattttgcggaacacctacatcggcatgaacgatgtcgatccgattctaaaagatagtgctaaaggaatgggcatgacgccggtacaatcaattatgcaagtggaaatcccaatggcgacccccgtgattatggcaggaattcgcctatctgcggtttacgtgattgcttgggcaacccttgcttcatatattggcgctggtggtcttggcgacttgattttcaacgggttgaatcttttcaaaccggatttaatcatcggcgggacaattcccgtcacattgttagcattgctagtcgattttggcttgggccggttggaaaaacaactgacccccgctgcaatcagataaggaggctcctatgcataaaatacgccgattcattacgagttgcggattattagttggcagtctcctcctgttaagtggctgtcagtcacttggcatcggaaaccgtcaatcacaaacaattcgcattagctctttaagcaccactgagtcacaaattctcgccaatattctgagcgagttgattacccacgaaacacaaaataaggtcactttaattaataatctgggttcttcaacggtaacgcatgaatcactaattcgtggtgacgccgacatagctgctagtcgctacgctggaactgaacttactggtactttaaaaatgaagcctactaaagatcctgaaaaagcccaaaaaatcgttaaaaaagctttcaaagatcgttacaaccaaacatggttcccttcctacgggtttgcggacacctatgcctttatggtcacccaggaaaccgccaagaaatatcatttagaaaccgtcagtgatctcggaaaagtggcggatcaactaacagctggtgtcgattccgtctgggtaaatcacgaaggcgatggctatcccgcatttaaagaaacgtatggctatgatttcaagaaagttgcgcccatgcaaatcggactggtttacagcgcactggcggctggtaaaatggacgtcgttttaggttactcaaccgatggacggattaaaagttatgacttaaaagtcttaaaagacgatcgccgcttcttcccaccatacgatgcgagcgtggtcgccactgatcagattctcaaagaacagccagcactagcgccccttttacaccgtctagatggcaaaatcgacctcgacaccatgcaaaccctcaactttaaagttgataatgatctactagaacccgcagtagtcgcaaaacaatttcttcaggaacataattatttccggaaaggagccgctaaatgactaatttaaatacttggcaacaacttgtctattatttccagcataatggcagttatgttttacggcaatttagtcagcattttttgatttcgatttatggcgttttacttgccgcgttgattggcattcccttggggatttttattgcgcaccggaaaaagctcagtaatgttataattggggtagcgaatgtcatccaaacagtgccttcactcgcaatgctctcaatcattatgcttggcttggggcttggcacacgaaccgtcattgcgactgtctttttatactccttgctcccgattatcaaaaatacttacaccggtatggagaatgtttccgataatattatcgattccggaatcgggatgggcatgacaaattggcaactgttacggatggttgaacttcccttatcattggccgtcattatggcggggattcgcaatgccttagtggtcgccatcgggattacagcgattggcgcgtttgttggtgccggcggtttaggcgacatcattattcgcgggaccaacgccactaatggcggcgccttaatcttagctggtgccctgccaaccgccctgatggccattatcgctgatgtgacgttaggctttattcaacgccacttagaagctccacaagcacgaccttaaatctcaacattaggaaggtgtcactatgaaactgtatcaagcattaacccaagtcacactaaacacacaaatggttgacgatttacctgattttcagattacaaccgttttagaccaaccattgaactttgcccctactcagctttaccattatatcgatgccgttttaaagagcggttctcgtcacgatgaaaataacctgttatatgtcacagacgcgatttttatcactgaaaactacaactttaaacaaactgaatttgcggcacttgccacaagcttcgaagaacgggtgacattagcgcgtaaaattgtggccgatctcaaccgccacgtctccgtcaatcttgatttagtgcaacacgaattccaattaatttttgtcgattagcaccactgccctaggcgatgttatttctacatctactggggctttttttattgaaatgaatgaacaggagtcctcactttgccaaatgcacagcgtcaaaatagcgcgctttacaaactcaatcgtcccgccaatcaactaacaccggaacaacaagcactacaagaacaagtcattcaattttgtttggcaaacgcgcacgccgaacacgccaccttcttgattcaaggtgcggccgggactggtaagagcgtgattctcagcagtgtcttcaaggcgttgcagacacttgcgcgccaaacacctacctcgccactctatggcagtcaaaacgtcctattggtcaatcatccagaaatgctaaaattctacaaaagtggcacaacaacggcccccgttttattgaaaaaagattttcaacgcccaacgacattcatcaatcaagcggctaaaaaccaccaacttgccgatatcgtcctcgttgatgaggcacacctactgttaaccaaatccgacccctatagccacttcaatcaaacaaatcaactcgatgaaattcgccgacacagtcggatcaccattctgatttttgatgaacagcaagtgcttaaagtgaagagcttctggcaacagcaacaactccgccaacgaattgaagctgctccccatcagaccgcgcaactaacccatcaatttcggatgcaagcccatccaagtgttgaaaattgggtgcaaacctttcatcaacaacaagtcgctgccctgccacatgatccacactttgaattcaaaatattcaccgatgccaatgagctctatcaaacgattcgctttaaaaaccaaacgagtgggcttgcacgcatgctagctacttacgattttccagcaacactcaatgatggtcacgatcacttcgttgagacatcgacattcaaattacgctgggatcggtatcagccaaccgctaaaacctattgggcagaacgtgaagatagtatagatgaagtcggatccgtgtacaccattcaaggctttgatctcaactatgccggcgtcatcatcgggccatccgtcacgtatgatccacaaagtgagcggctagttattcatcctgaatattacgaggaccaagccgcatttgccggcgcagcacagctggctgatcctgaagccgcgaaacagcaaattattcttaatagcctctacgttctaatgagccgcgctagaaacggcctttacctctatgctgttgatcccgcacttcaggccaaattgctcagcttatgacaaatcgattttatttcccggggaataagtcagttttctgtctatctctatcgaaaacaagtaaactgtaagtagaaattttaaactgataaaggagtgttttaatatgtctaacttaacgagttcatacacgctcacaaacggcgtgcaaattcctaaaattggcttcgggacttggcaaacaccagacggtcaaacagccgtagctgctgttgaagaggcgctcaaggcaggttatcgccacattgataccgcccaagcttacggtaatgaagggagtgttggtgaggccatccaagctagtggcgttgatcgttccgatttattcctaaccaccaaaatctggaatagtaatcacacttatgatttaacaatcagctcttttgaagaatcactcaagaaattacaaaccgactacgttgatttgctcttaatccactggcccaacccaattgcctaccgtgatgattgggaaacagccaacgccgaaacatggcgtgcaatggagatgctctacaaagctggtaaagtccgggccatcggggtcagcaacttccgtgttcgccatttagaagcgctcaaaaagactgcaacggtacaaccaatggtcaaccaactcttcttagcccctggcgaattagaacctgaaactgcccaatactcacgtgaacatggcatgttattagaagcttatagcccacttgggactgggaagattttcagtgtgccagaaatgcaagaattagcggacaaataccaacgctcaattccacaaattgcactacggtggtcattacaacacggcttcttaccattacctaagtctgtgcatgctgaatacatccaacaaaatgcccaagttttcgacttcgaattagccgatgaagacatggctgcaattgatgcacttgacggcgtcgttggacacgcgcaagatcctgatactgcaacattctaaaactgtttaaaagccactaacacagtggcttttttcgatacagatcaacgtcaaaatgtgacaaagcgtattttagtttagatatttaacaatttagtttacctcttccctaaattatggtattttcattattattgaatccgataaaatcggactaaagcccgacgttatttaccgttttaagcttgagaatggtaaaatagaactagttagttaagaaatggggaattattttgtcaagtggtgagttattcactaatctatttgttatgttggtcaccttctttttagccgccttcttcgtggccgctgaatttgcgctcgtccaaacacggccaagtgccttagaagatgccatccattcaggaaatggtaatcctaaaaaattgaatcttgcgcttaaaatgacgcaaaacttaaacgaatatctctcaaccacccaagtgggggtcagtgttgccgggattattttagggtggattggtgaatcaaccgtcgaaaccattctagtcgatctgctcggtctcactcacctgatttcaaatggtggcttacacatcatcggcgcagttgccggcgtgttagtcttaacctatttagaagtggttttcacggaaatcgtgccgaagaatattagtattgatattccaatgcagatgttgatggctgttgctaagcccctccattactgtcatattatcttctatccatttgtttggttactcaacatttccgcaacgggtgttgtgaaattaatcggcttttcacctgctgaagaaggtagtgatgtgctttcccaagcggaaatcattagtctctctaaaaatgccgtcactggtggtgaattagatcgcaacgatttagtttacatgcaacgggcctttgactttaatgaccggattgccaaagatgtgatggttgatcgcacaagtctctacgtcgtcgatatcaccgataccgttaaagacgtcttaaaagactacttacaacaaggctttagccgcttcccagtggttgctgaaaatgataaagacaagattcttggttacgtctacgcatatgatttagtccgtcaggcacaagttgacgattcaatccgcgtcagcaaattactgcgttcgattatctccgttccagaagcaacccctattcacagtttgttgaatcaaatgatcaataagcaaaccccaattgtggtcgtcgttgacgagtacggtgggacgagtgggattgtcactgataaagatatctatgaagaactattcgggaccgtcaaggacgaaattgacgatgtttcagatgaatatatcatcaaagaagacgataaccgttaccgtgtcagtgggaaaacgacgctctatgatttcgaacgtttcttcaagactaaaattgatgccttcgaagcctcagatagcgtgaccctggccggttatgtcttagaaaacttcaccgacttacaacaaagtgcggtcattcatatcaatcaattcacattaaaagtggtcgaattcaatcgcggttacatcgactggtttgaagtctccagcgaaccacaaaataatacagccaacaatacaattattgaaaccaattaaaaaaagagtttgctatcagccatctcctgaggattaacaacaaggagatggctgatagcacatgtttaaacaaaaacagccttgcgcaaatgcgcaaggctgttttttaatttcgttatgctaaataatcacgactccagatgagccccattactttttcgccggtgtgcacgccgaccacaggaccaatgtgactcgtttcaatcggcatccctgggaatgtttccgtcaacgttgcgacccactgcgcactttcttctggattattaccgtcaatcacgctaacgcgtacgggatagtcaacagattcgactgctgctttgaaatctgctaatactttttgaaaggcccgtttcttggtccgttccttcgttaaggcaacaatttggccggcatcgttaaaacttaaaatcggtttaatccgcaaaagattcccgacaaaggccgcactattcgaaatccggcccgttcgcaagaggtggcttaaatcatccacaacgaaataaacgcccatcgttgctcgtaaagctaccaatttcggcatgatagttgcggcatgttcaccttgggcaactaaccgcgccgcttccaaggccaagaacccttcaccggcactcgtaatcttggaatcaaaaggatacacttcgatgccttcaaccgactgtgcgtaggcggttaggttattgacaaagctcgtaatgccacttgaaagatggatacaaatcacttcatcgtagcccgcttttatcaattgatcaaaaacctgttgcatctgacccattgtaatttgcgaagtcgttggtaatttttcagtagtgcgcattttatcgtaaaatgcttcactcgtgatatcgatattttccaaataagtttgttgtccaaaaataacggtgattgggaccacagtaatattatggtcggcggcaacttgtggatctaaatacgccgcactatcagtcacaattgctgttttcatgtcaggctcctcaataaaactgtttttgtcattatcccaccaatgtggataaagtacaaatgaacaacaaaaaacgccggaccactttctgcccgacgccacagttattaatgagtcattgattcattctcaaatacgacaatggagatgtgcccatcaattaagccactgttattactcaaggttaacatttgattcttttcgttaacgtctaatacttcatgttcatcaaagtagccagctgcataatctttgtagtaaacagcccctagatttgattcaaattcatctggataatctttaatgtcagcatccgctggtactaatagcaatctaaagttcgtatccaacgagcaataaccaacgtttgaaaatggaccaacaccatcatctaagtccaataaaattttttgacccggtgtcatcttatccttgattttcgcaactgctgcaggtgttatttttaatgccatatcaatcatccctttcatgcttccagtctaccgccgttttaaatttgacacaatctatctgctcagccagtgtgctacaataggcttaaccgtttatttaaggaggtcattatgcttttttatcggtattcatactttagcaatcagaatgatttcgaattctatctcaaactaagtctgtcagtgatcatcgccagtttaatcatcatcttcttcgttcaatatctccgccaccgttcagattcgaagtaccgtgacttactaatcatcttcggcttagttgggattttactcgccggcattcaatatacacggattcaacagcttaacaccgcccactcgcaacaagctcagatggcgcaattcattagaagtgtggcgactgcgcagaaagctagccttaaaaccgtcgcagtcaacacgacttcgcttcagcaaaacatggtagtgcgcgtcggtcatcaaaactaccaagtcatatttgataacaattttactagttatcaactccaaaaagctcagttgattagccaagacatcacctatcaagattaaggagtttactatgccatcttatttcgatattaccattaaattaattttcggtttcttctgtttagtgttacaaatcaacctctctggcaaggggaatttagcccctagcagtgggattgatcaactccaaaattacgttcttggggggattgttggcggtatgatttataatgccgatatctcgctcttacaattcttactcgttttactcatctggaccttaatcgtcttcacaatgaagtttctaaccactcacaatcgctggattaaacgctgggtaattggtaatccacaaacaattatcaccaacggccacattgatattcaaacggcctctaagaatagtttatccgcacaggatctgtcgtttaaactccgaattgccgggattagcgatattcgcacggtcagtcgcgcaatcttggaacaaaacggacaattaaccattacgcaaaaaggcgacgccacgattaaatatccgctgattatggacggccagattaattcagaagcacttgaattaatcgatcaaactgaagaatggctcctcgccgacattcaacagcaaggctacagtcttcaacaaatctacatggctaactacttgaaccatgaaatcgtgattacgccctattaaaaaagatgacccgcaaaggtcatcttttttaatgtcgtactctttggagaagcgttgcaaccaaccagacaatcgccccgccaattaaaacaatcgtgcttgtcttcaaaccataatccagaacagccaacccatagtcggtaattgtttgattaaaatcgcccgctttttgagcaatttgttcaacaatgccactatatttaaacgcagccgcccctagtgccaagaataagccactccaagcaaaacttgcaccaacactccctaatacataccggaattgaccacttagtccccattgaactagtacaagaacaattcccataataattgcaacccaggttaagatattgatcacatttctaacaaacaacatcttagtcgctaatggtgctaagtaaggtgcttcaatttggttcgtgaggtattcttgtagtggtggttgaaccgcaaccactgccgttttaattaaagattccgtcaacgcattttcaggcacaactgcttctaaatgggctgcaagttgtcccatcatttgtgctgtgggtaacggcttttcttgtcctatataaatattatgaacagttttctttaaatcggcccgcacatcagattgggtcagtaatttgacttgtacttcagttggtagcccatttttttgtgccgcatctaataaaacaacgttaattttatcagtcatcgcagctaacgtcttcggttcactgagctgttcttgcgtaaatgattctctcaaaactgtcaggctgagaatcatgccaccaatgccaaggaaaacgcaaagaaagattaagaacgtcaaaaagcgacttaaacctcgatgtggtcgcacgcttggttgattttgattcaaacgactaattggttccattgattaaacaccctttctattcacgaaccctattaaacttcaagactaggattcttaatcattaaatgctaaagtgaacttatcagtcacaggaggccattcaatgttaaaaaatttaacgattctctatatttcaattgctggtaatacacgttcatttgtaacggatttacaggattatgcggcgcaacaacatgctaataacccagcgttaccaaccattaccctcacagaaatttcggatgcgaccccctttaaagcggagaccgaaccgttttacgcgttcgttccaacttacttagatggtggcaacggcattgataatggcgttaaagaattaatgaccaatagcttaggcgaatacatcgattatgcgcagaacgcacgcctttgttatggagtaatcggtagcgggaaccgcaacttcaacgaacaatattgcttaactgctaaacggtatgcggtacaattcgatgcaccgtttatcgccgattatgagctccgtggcaatgcgaaagatgtcgcgcggatttataccttaatggtcgctaacgcgcaacagcatgcctaaaatttaagattagccggtaatgatgtgattaactcggtgggttgttggacaatttggacagcacccgcctttttgagttccgcgattgtgccaaacccataactaacaccaactgcattcatcgcgttttgcttagcgcccaagatatcattttggcgatcacccaccatcagtaatggtgcggtttgtggcgctagaccaagttctgataatgcgtaagtaatgacatccgcttttttgacccgcgttgtctcatcaacacttgctccaaaaacaccgctaaagtaatcacttaactctaaatgatcaatgaccttcttagcgaatggttctggtttcgaagtcgcaattgccagttgtaaatcctgtgcttgcaatgccgctagggtttctcgcatgccaggataaagttgattttcatacaaccctttaggcgcataataggcttgaaagactttaatagcttcttgagtagcagctgcatttaaaccaaactcacgcataattgtttcattgaggggtggcccaatgaatgtgaccagttcagctttggtttgcgtcggcaatgataactcctcaatcatatattccaaggcgttcacgatgccttcttgcgaatcggctatcgttccatccaaatcaaataaaacggtcccctttgtcatatcaatcatctctcgatctcttataaagtaccttcattttagcatactctttgacccttaaactttccttattgcttttttcataaatctataaacctctggtcacaaaatcttcacaaattcccattatagtattgagtatagaaaagcgaatcttttctatttcatactacttaactttttcattttactcctccaaagtaaaattaaggtagacgcaatctaccacgcacgtattattcccccaaagtaatacgtgtaccccttactcctttttagatcttcggatctgctagaaaccagtctccccaaggctggtttttttgtgtccccatcaaaaaagccgccagatatgctgacaaatttgtccaaaaattcggattaaatttgcaatctaccttacaatcgttggatcgattttcttagttttagccaacttgcctgttaagagttgggccgattggatggtttcaactggtttgaccccatattggaacgttgcctataacgcatcgtttgcaattatggcgttaatcgccgttgcggggattgcttattcttgggttcaggatgaaggttttgatccgttcccagcctcattacttgctattgtttgtttcttattagtgacgcgcccaagcactgccattgtttcggcatccggtaagattgttgtctctgttaaaatgatgagtcaacaaaccgggtttattgatcggacttggcttggtggacaagggatgattactgccattattgtcggtttattagtcggttggatttactcagctttcttaaaacatgatattcggattaaattaccagaacaagtgcctgcgaacgttgcaggttcctttaccgctttgattccagctgctgttttaattagtggctcactcttggtttatatcttcttcgacaaggttgcaaactcaaccttaacagaatcaatttacaataccattcaagcaccacttcaaggaattaccgattcatttggtggcatgttagccatttctttcttagtaccattcttgtggttcttcggggtgcatggttcaacaattgttggtgggattatggggcctttattgcaagccaactcactggctaaccaaaaaatcttggattcaggcaaagcattaacgttagctaacggtggtcacattgtgacgcaacaattacttgatcaatttatgacagtgaccggtgctgggatgacaattgggattgttgtttacatggcattctttgccaaatcagcacaattcaaagatttagggaaattatcattagcaccagcagtctttaatatcaatgaaccgattttgttcgccacaccaatcgtgatgaacccgattatgatggtgccattcttcgtgacaccaatgctatcagcaatcttaacgtggactgcgattcgggtcggtttaatcccaatgttccccggaacgttggtaccatggacgacaccaccaatcatttctggtttattagtcggtgggtggaagaccgcattgtggcaagccttaatgttactcatgacgttctttacgtacttaccatttattcggaaacaagatcatttaaactatgcttcagaacaaggtgcaacaactaaatagggggaaaggtcaacatgggacaacttagaaaagattttttatggggcggcgcagtggctgctcatcaattggaaggcgcttggcaagcggatggcaaagggattagtgttgccgatgtgatgactgccggggatgttaatcatcaacgggggattacagatggtgtacaaccggggcacaattatccgaaccacgaaggcattgatttctatcatcgttatccagaagatattaagttatttgccgaaatggggttcaagagctttagaacatccattgcatggacgcggatttttccgaatggggatgaagcacaacccaacgaagccggccttaaattctatgatgacctatttgacgaatgtctcaaatatcatattcaaccagttgtaacgctctcgcattttgaaatgccatatcacttggtcacggaatacggtggttggcgtaatcgcaaagtcatcgactttttcttgaactttgctgaaacggtcttcaaacggtatcgtaataaagtgaagtactggatgacgttcaatgaaattaataatcaagccaattaccacagccagtttgccttatttacaaattctgggttacagattcaacctggtgaagatgctgaaaaagtgatgtatcaagccgcccactacgaattagtcgcgagtgcaaaagctgtacaaattggcaagcaaatcaatcctgatttcgaaatcggctgcatgattgcgatgtgtcccatctatccactgacagctaaaccagaggatgtgctcaaggcagaacgcgcaatgcaaacccgttattggtttgctgacgtacactgtcatgggcgctatccagaatggctcttacaatatcaaaagaaccaacactacgatttggacattaccgcagatgatttgaaagaattggctgcagggacagttgattacatcggcttcagttactacatgtcatttgcaaccaaggacaaaggtgaaacaacgcttcattatgatgaagaatacgatttagtacctaatccatatgtcaaggcatcggaatggggctggcaagttgatccagttggcctacgttatgtaatgaattggttcaatgatcactatcacttaccagaatttatcgtggaaaatgggtttggtgctgttgatcacgttgaagcagacggccaaattcacgatccttatcggattgattatttacgcgaccacattgttcagatgaaaaaagccgtggaagatgacggtgttgatttgatgggctatactccatggggctgtattgatttagtttcagcaggcaccggacaaatgtcgaagcggtatgggtttatctatgttgataaaaatgacgacggaacggggacgttagctcgttctaagaaggactctttctattggttccaaaaggtaatcgccaccaatggggatgacctagcataatcatgaatagcgacgcaggcaaattgattttgtctgcgcctttttttgttgaaagaagcccatgcattattaataacccatttttctgaaataaaactgttattttatcgtgagttaacactaggcaattaccattatgaaataaattatgagaattagggcttatctaatgcaaaaataatcactatcgtttacaataagtaagtattaaaaatggaatggggtaaagaaatgacaattacatatgtcgtcatcaacatcgtgatcatgcttatcatgttatttgttttaaacaagatggcccggattcacgttaagtttagtcgccgcgttttcacggcattgggggtcgggattttattcggtgcactcttacagattatcttcaaagcagattcaacggttgtcaaacaaacagctgattggatcggcattgtcggcaacggttatgtctcgttcttaaagatgatcgttatgccgttagtcatggtttcgattattcaagccattacgaacttggaatcatctaagggcttagggaagatggccggcatggtcattggaatcttaatctttacaaccttaatcgcagccacagttggttcagtgacagcggatgttttcggcttaaatgcgagtgatattcaatcaggccaagtcgaaaaggcccgctcgaaagaattacaaacgaagctaggcgatgtacaggaacaaactgttcctgaaaaaatcgttagcttcattcctgaaaatccattcatggatatgacgggttcacgacctacatcaacattagctgttgtgattttctcagctttcttaggggtggcagcattacaattacggcgtaaaaagccggaacaagcagaaatgtttaataaaatcgttaacgccttgtacgcggttatcatgcgcatggtaaccttaattttacggatgacaccttatggggtgttagccttaatgacaacgaccgtagcacaaactaatgttaaaggaattctcagtctaggcgagttcgtgattgcctcttacgtggcattaatcatcatgttcttgattcacttcctattaattgcgttcacggggttaaatccaatcaactacattaaaaaagtgattccaacgttaatctttgcgttcacgtcacggacgagtgcgggttcaattccaatgaacattgaaacccaaacgaaacgtttaggggttgaagatgggattgctaatttatcggcttcatttggggcttcaatcggtcaaaacggctgtgcgggtgtttatccagcaatgttagctgtgatgattgcaccaactgttgggattaatccttggagcatcggtttcttggttaaattaatcttgattgttgcaatcagttcctttggggttgctggtgtcggtggtggcgcaacatttgccgctttaatcgtactttcttcaatgaacttaccagtcgggttagccggactattaatctcagttgaaccattaatcgatatgggtcggacagccttgaacgttgatggctcaatgactgctggggtcttaacggctcacttattaggtaaattggataagaacaagtttaatgatatgagtttgacggaagattcagacgaaatggcttaatttcaaaaaatggagggtttagtgatgcgaacgattattatcggtgccacagctgccggaacaagtgcagctgcgaaagcaaaaagaacgaatccagatttagacattacgttatacgaaaaacgggactatgtgtcctttggggcttgtggcttgccttattttgttggcgagcactttgaagatcccaaccaaatgattgcccggacacctgaaaaatttgctcaacaaggtattgatattgcgcttgaacacgaagtactatcagttgactttgatgcgcaaacaatcgtggttcgggatttgaaaaccaatcaagatcgcacagaatcttatgatcaattaatgttagcaacgggagccacagctgtgatgccaccgattaaaaatgttgatctcaaaaacgtctatcatctacggacgatggcagatggacaagccttacgtgaattaggacaagatccaaaggttcaatctgtaacggtgattggtgcgggctttatcgggttagaaattgccgaagagttccatcaattagggaagcaagtccgggtcattcaactagaagaccgaattttaccactggcttttgatccagaactaacggacatgttcgcggatgacttacgtgataacggcattgaattacacttatcagaagctgttcaagccttagaaggaactgttcaggtgactggcattgtgactgataaggggcagtatgcgacagacttagtgattgtagcagctgggattcggcctaatacgcaattcatcacggatgatcgattgaagaagttgccaaatggtgcgattattgtcgatcaagcagggcggacatcgattgaaaatgtctatgccgctggcgataatgcaacggtcattaacagcgtgacgaaccaaccgatgtattcagcacttgccactggtgccaataaattaggccgaattgtcggcacgaatttaggcgggcaagccgctcaattaccagggatgttgaattcagccggtgtgaaattaatcacgctagaagcgggccgaacaggtttgactgaaaaagaagcggcagaggctggtattgatttcagtactgttttaatccacgacaagaaccaaacgaattattatccaggccaatcagatttaacgattaaattgatttacaccaaagcagagcatatcttaattggtggccaggtggttggtcaaaaagacgcagtgttacgcgttgatgtactcgcaactgcgatccaagcgaagatgacaactgaacaactcgggttactcgaccttgtttatgcaccaccgtttgcaagaacgtgggatgcactgaatgtggccggcaatgttgcccattaattaaaaaaaaagtgacaccgcacaaaccgtgtagtggcgctttttttgttgcatgcttaaacagttgttcatagtgtttacttgaatgtttactcgggtctgtgctaaaattgcacttagaaattaaatttttgcaaagttagttatgaattaattacgatgattaagaaaacacaaataaaaaatttatcgacaggagacagtttaatgaacaacacaaagagtttgattgcattgagttctggaattttaggggcagctgggatcggtttattgagtgcagggcaagtacaagcagcaacgacagcaaccgtcaactacgcagatggtgcaacaactgtttggacaagtccaacaactggtcaaactgctaaacgatacatctttaagggccaatcagtaaatcttttagcatcacaaaagattggcgctgaaacatggtaccgaattggaaacggcgaatgggtacctgaacgttacttaacaaccagtgacgctacaccagctgaaacaacaccagcaacagaagcacctgctgctcaaaagacagctcggattgcctatgccggtggcgcaacaactgtttggtcaacagcaacttatacagccccaacaggccaatacttaggttatggtcaaaccgtcaacgttgtgaaaacagaaactgtttctggcgaagaatggtatcaacttgaaaatggtagctgggtaccagctcgctttacaggtgatggtaagattgaagccacaccaacgcccgttgcacaaccggtagcaccagcacaacctgcaacagcgactcctgtcgaaacaccagctgcgccagcaccagttgcaacaacaccagcgcaaacagaaagcacgcctacaacaccagcacctgtcgcagaaagtgaatcaacaccagttgaaacgcctgccacactagaaagtacaccagctgtagcagaaagtagtgcgcctgctcaagcagaaagtacaactcaaacacaacaaccagctactcaagaatcatcagctcctgtccaagaaactgcaccagttgcaacaacaccagccccaactcaaaaggcaccagttgaaacaacaccagccccaactcaaaaggcaccagttgtaacgacaccaacaccagccccaacggcacctgcagcaacgactggtaatgcgcaagctgttattaatttagcgatggctcaaattggtaaaccttacgtttggggtgcccatggtccaagtagttttgactgttctggattaatggactatgtcttcagaaatgctgctggtaagagtatcggtggttggacagtccctcaagaaagtgccggttatgctgtttcattaagcaacttgcaacctggcgatttattattctggggttcacaaggtagctcacaccacgttgcgctatacattggtggcggaaaatatattcatgccccacaacctggcgaaaacgttaagatcggttcaatgcaatactatgcaccaagttttgcacgccgtgtcttttaatgattgcaattaagcgaacatctcacctaggtgggatgttttttgtattttagccctaaataagctatgatatgtagagatttaaaaaaggactgacgagatgaagatagaagtacaagcatttatcaatcaaattcaagatcaaacatatttaacggatgaatacgagctccccacgccagatccttttgtggcggacggtattttggcacagttaaaactcgctattgataaagccattgaaaaacaagctttggcctctttttcggtgctgacagaatatgctggcgaacccgttaaggtgacattggaaacggggattgtgaatctaccattacaatacattaaaaaagtaaatcaattttttgaactcgacgaccaagcagaggtgaatctttatttatatgtgacatcgccactcattaatcgctcgaacatgcggattgacttaattgggacggtagcttcgtttgaagaatcggcagctgctaattggacgaagattgccgacttgctaacaaaggacttggaagccgtcgtaatcggttcacaggcgcctaaagaagaaccagtcgaaaagaaggcgcccgctaagaagaaagccgcacctaagaaaatggcaacgactaagaaaaaagcgcctgccaagaagacaacagctaaaaagacagctacccaaaaaacaacgactaagaaaacaaccaccaaaaaaaagactacgaaaaaagcagactaatttagtctgcttttttgatggcgtctattaaaggcaagtcgccgttaacaaacgagaatttcttgtggattgtttcggtcggatgttctaagacggtgcaaatcatcgcagcgacatcagcacgtgcaacttgcccaccagatggttgcattgtcactaggccggtagcttcgtcgtttgtaagtgtcccaggacgcaagatggtccaatctaaaccagagaattcaagccagtgatcggcatagtattttgcagcgtagtacggtttaatactttcaggccatttagttcgatcctcaacaaagagtgcactgaccatgacgtagcgactaacttcagcaatcttagctgctgccatactcttaacggcgccatcgagatcaaccaacagtgtttgatcatcgcctgttttaccgccagaaccagctgtaaagacaatcgcatcatgatcggcaaatagtggtgctaaagccttaggttgtttggttaaatcgaataagacaggcgtggcccctagttgtgcaagttcatccgcctgttgttcgacacgaatgccggctgtaacggtgcaaccggcagcaacgagttggctaattaggagctggccaacgttaccatgggcgccaataacaaaaatccgcatagtaaaacctccaatataaatgtgtgtgctgtccattatagtagttattgaacagtgacgcaaagatagtggatttaaaaacctgtgttgtagtacaataaaattcggcaccttgcgaaaaaatgagtgtgctttagggtatataatcttgaaagtggctgatggcaacctttaaataggcaaagctaattgtgggattcgttttagaaataaatctaagaatcctctcattttttcacaaagttgcttattagaatatcatgaagccgtgtttgttttgtgttatggtacagatatagagattgtgatttattggataagtagtcctatttgttaatgctatctcagaaagtaggaggagaacatgacaaatcaatatcggagcgtttttgatatcattggaccgattatgattggtccttcaagttcacatactgctggcgcagttgccattggacatgttgctaatcgtctttttcatgcaccgattaacaaagttattgtgcgttactacgaatcttttgcacaaacccaccaagggcatggtaccgattatgcaattattagtggcgtgctaggattcgatccggctgatcaaagggtaccaatggcagttgatttagcgcgacgtcaaggtattgacgttgtcttcattgaagatccagggaatagtccggtgcaccatcccaatacagcggaattaacgttaatcaatcgtgagaaggaactaacgatttggggctgttcaattgggggcgggaccatcgaaatccgccaagtcaatttgaatggcattgtgattaaaacggatggcccgttaccattggtttttgtcgaatcggaacaagaaatcggcgatgctttagaccagatatttgaaggtaactatcgtgataagcgcatatcggttaaagtgccagatcggtttttgtataaaatcgaactgattgataagccgtacccggaacagattgaacaggtccgcggaatgagccaagacgttattgtgttatagaaagtggtgggaagatgtatacaacaattcacgaattagttgaaacagcgcaagaacggcaactaccaatctcggaattgattatcgaacaagaggttgcgatgagtcacactagtcgtgaggtcatttgggcaaccatggggaaaaacttggatgtcatgattgcggccgaagaaaaaggcgtgaccggtgaaggtgttcagtctgccactgggattacaggcggtgaagcggttctgttgaagcggtatcgggaaaagggaaagtcgttatcaggtgatgtgatgttgaccgctatgcaaaatgcagtggctaccaatgaagtcaatgcttcaatggggatcatttgtgcaacgccaactgctggttcagcaggtactttacccggtgttttatctgttattactgagcgcttggcgcttgatcgggatgcgcagattcggttcttgttttgtgcgtcagcctttgggatgattgttgccaataaggcgatgattgccggggcaactggaggctgccaagccgaagtggggagtgctgccgcgatgggcgccgccgctgcagttgaagctgctggtggcacaccacaacaatcgtcggaagcattcgcgatggcgatgtctaatctattgggattggtttgtgatcccgttgctggattagttgagataccatgtgttaaacgaaacgtgattggggccgtcgatgccttgaccagtgctgatatggcattggcagggctaatcagcaagattccagctgatgaagtgattggtgccatgaaacgaatcggtgaagatatgccatctacattacgtgaaactggtttaggtggattagctgctacaccaaccggggttgcattgaagatgcaaatctttggtaaggataagagccttaaataaaagcgacttttaggaggagcaatcatgcaaaagaaactttcaaaatccgcatacggcggtgtttcaggtgagaaatatgtaccgtatgtcaatcaaggcgacaaaaaggtcggcaacttagcgattctaataatggggagcattttagccattatttttgctgcttcaacagcttattctgggatgaaggccggtttaaccgttgcagccgggattccaggttcaattattgggtctgggttagtcggcgcctttgccaaatcaaaagggattttaggcaagaatattatgcaagggatgtccagtggtggtgaatcaatcgccagtgggatgatttatgttttaccagctattattttaattggtggccacatcaacttcattcaagggatcatcgttggggtgctcgcaattcttttttcaatggggacagcctcattagtgcacaactacttaatggttgaagaacatggtaagttggtttatccagaagccatggcgatttcagaaaccttagttgcgtcagatactggtggcgattcgcttaaatacatgggcgttggctttggtatcggtggggttattacgatgctaacttcatcagtgtttggtgtcgtcaacaacatgattagctacgttggttcatcattttataaatggaaattggacgttgaagtgaatccattacttgcaggaattggttttatcgttggattagaagtgtcattaacaatgtttgcgggtgcgattttatccaactttgcgattgcaccgttaatcggttatttcacagatatggcgggcaacagtgcgcatgtttggaataacacgagtttagccgtgaatcaaatggccgttaacgatttatcaagttcatacgttaaatacattggtgccggaatgatgctttgtggtggtttaatcggtgcgattaaattaatcccaactatcgtgacatcaatcaagaaaacactagctgctaaaaacgtagcaggcgaagaaaagaatacacttggtatgattgccattgttgttggtggtgttgggatcttcgttattggtattatcattgcgcaaaacttcttaatggggattgttggtgcattactagcagccatcttaagtttactctttgtcattgtttcagcccgggttgctgggacgattggttgttctaacttgcctgtatcagggatgacaattgcgtcattagtgattatgacggtagtcttcgtattatttggttggacggacaataaccatacgcaaatcttattgatgttcgggacattcgttgtgaccgccgttgctgttggtggtggctacatgcaatctcaaaaagtaacatatgtcattggtggttcaaaatctgaaatgatgaaatatttcatgattgccgggattgtcggcgtaatcgtaactgtcggcacaatcagcatcttatcaccacaattcgttacagatagtgcaacaccagcctttgggttaccacaagcgaacttaattgctacattaacatctgggattatgacgggtaaattaccatggatcatgattatcgttggggttatgatggcattagctttctactttttagatttaccaatcatgaccgttgcaattggtttttacttaccaatttcaaccacttcaatcatcttgatcggtgctttgattaaagtctttattgaaaaagcaacgcgtgatgaagcgattaagaataatcgggttcaaagtgggattagtttatcatccggtttaattgctggtggttcaattattggtttaatcgggattattctccacgtaaccggtgtgttaaaagatcgcgtgattactggttttgcgaataccaatgcaatggggattatcttattggttgtcatggttgtttcgattactgtgccacttatgatgattcataaaggaggggcaacagaagatgggacgacagaaagcggagattgatttagaacaactcatctatgaaaaaaatccgcaagttcagtttaagttacaagctggccaggtcaccattattcggccgcagaatcactggattcaacggacattacggcgtttgcatgtgaagattccgctagaaacacagctggaacttgatgattatggtagttttgtctttaggcatgtgaatggaaaacgcagtgtccaccagattggccaagcactggcaggacagtatgatgaagccggtgaatacctgtatgaacgattactcgtgtatttgaatcatctagaacacacagaacatttgatccggcgggtaaccgactaagttttattaatcaattagtgaatcacatttttaataaaaaggagtttttcaaatgacagacagaatcgaattatcagcatgtacttcaatgatggtagggaagaatgcgtcaattgatggctctacgatgatttcgcgaaatgaggatcgcttctatgcaatccatcctaaacggttcttcgtacaaccagcagttcatgatcgacatgagacatatgtttcaaaatataacggcttaaccatgccgttaccgacggacggttatcgttacacatcaacccccaacggcgatttaagtgatggtttaaatgaagaagacgggattaatgaaaaaaatgtcgccctctccgcaactgaaagtgtttatgccaacgaacgggtattagcttatgatccgttggtcaagcaaggtttagctgaagattcaatgtgtacgttggttctgccatacatcgattctgcacgtcaaggggttcaattgatgggggatttgattgctaaatacggttcagctgaaggcaatggcgttcaatacagtgatcaaaatgaagtttggtatcaagaaattgttactgggcatcactgggttgctgttcggattccggatgattgttatgcagttgccgctaaccaaattgccatcgaagatgtcgactttaatgatccagaaaattacatgtggtcagaaggtattcaagaattcgtcagtgaaaatcacttgaatccgagtgaagctgaatggaacttccgtaagatttttgggacggatactgaattagatcgtcactataacacaccacgggtttggtatgcacaacgctatttgaaccctgaaatcaaacaagaacctgaatcgagtgacttgcctttcattcgcaaggctaaccgtaaaataagtgtggaggatgttcaatatgtgttaaaatcacattataacgaaactatttacgatccacttggtaatgggacagaagaacaaaagacgatttatcggtcaatttcactttcacggacgcaaaactcacatatctgtcagattagaaacaatgtgccagatgctgtgcgtggtgttcaatggttaggtttgggggtaccaacattctgtccacacgtaccattctttacgaatgcgatggatacggatgaaagttatcgcgaactaccagcgaagatgcagttgaagaacgcttactggttatatgaagcattagcaatgattgttgaatcacactacggggcctttaagaaagctgatattgactaccaaaaagcattatcagaatgggcaagaactaagattgctacggtggatgctgctgtaaaggcggaagcgaatgccactgatttcttaacccagcaaaatcatgaaattgctgcacattaccatgaagcaacaaccgatttgttagcgcaattggtgacagaaggaacgcaactttctaagttgaccttcgtcatggataagaacctatagccaagtgcgcactttaatcatttgtcacactcttccaaggggggagtgtggcttttttaatcgatggaggtgctacagtgattgctttaaaaggaaattcgaaaaaaattattatcgcgatggtatacggttttttggcggcggtgagtgttaatctgttcttgattccggcgaagacgtattcgagtggggtcacggggattgcccaattactaacctcgttagtcagctatatgggcggctcattaagtgttgcgatgttggtctttattttgaatgtgccattattgattctggcatggttcaagattaatcatcagtacgcgatttttagtatcgtcgctgtttttacgagtgtccttttcttgaaggtcattccagtacctgttcacccaattgtcaccgaacgatttgcaggtgccttgttcgggggtgcattgattggtttaggggttggcttgtgttttaaagcgggtttttcaactggtggcacggacgtcattgtgacgttagttgggcgcttaactggcaaacgggttggtgttgtgaataatatcatcaacggaatgatcattcttgcagcgggcatcttctttggttggggtgctgccttatacagtatcgtcgaaatctttgtttcaagcttgttgatggattatatctatattcaacaacaaaaggtgactgtgacgatttttaccaagcgacctgaagaattgaagaagcgaatgcgtgactttattcatggtgcgactgaattagatggaactggtctgtataccaaccaagaaacaacagtgatcatgacagttgtttcaaaatacgatctaacggaattaaaacgggtcgttaaggatgccgatccgaatgcctttgttaatattcaatccacaatgaacttgtggggtaaatttgaaaacgtcgaataatagtagctatcctctggaactaaaaaacggtcctttcaacaacgctaagttgtgaaaggaccgttttttttatgtggtttggcggagttgaccgtcttcgatacgccaaacgtgatcgacgagatctaaaacccgttcgtcatgtgttaccatgacagctgcgcgtttttgttcatgaactgcatcgcgaattaagtggacaatttcacgaccacgttgcgcatctaaactggcggttggttcgtctgctaaaatgagtgcaggttgattgataagtgcccgagcaatggcaacccgctgcttttcaccaccagaaagcatagcgggataactatgtaatcgatggcctaatccaagttgtgtcagtaattgttcagcggcggattgatcgcgacgacgggcgattttttgtaaaaaagtcagctgctgagtgaccgttagatagggaattaattctgaactctgaaaaataaaaccaattgattcgcggcggatttgtgtttgacgattacgattgagtgttgcaagttcttgaccggccaaggtaacacgaccggctgtgggttgcaagagcgcgcccataatcgtcaacaaagtacttttaccaacaccgctgggaccaacgatggcgctaaattcacctggctgaatcgtgaaggagatatcttttaaaatgtgattaatttgatcaccatcgggataatctttggtgatgtgttcgagtgttaaaatcggtgctgacatattaatgacctccaatagctgtgatcgggtcaatccgaatcacttgaataagggataatagggcgcttaggatggcgacggctaaaaatagaacgctggtgccgatgatcgttggtgctgtgagcataaacggcatgctggcaggcattgactgggcgatgacactaatgataccgccagccaaaagaatcgccactgccgttaacaagccaatctcagagatgatgtgctggctgagatagcgtgtggttgtgcccaatgcttttaaggccccaaagtcccgtaatttctgtagggtaatgatataaaagaaaattgcgaggacaaacagtgagatgacgtataaaaagccgatcatcaagtacaatgaactttgttctgcagagtagccagggatgttatcaatcaaggtttgtttgctgatcacttggtagtgcttgttaaccgacaagggccgtttgctagcaaacgcgttataggtcgtcttttgcgttggaaaaatggtttgccactggtggtggtttaaataaataacaggcgtatgggcataagccatctgcttgctaaagccgccgattttaaattgctgaccagtggtactgtctttaaaggtgtcgcctaattggtaaccattggcttgtaacttgctgctgaccaccactttttgggtggcttggttggacagcttttgaccttgggtgactttgggtgtcatgaagctcgtagcgtcaactgcaatgtaggcaatgtcagtttttgtttgttttttaggccgctcgatggtggcttgggtgacgttgatgggtgtcagtgattggtgtttgagagcttgccaatcagattgggtgagtgccgagcgactcaaccgactttccgaaccggcttgtaaaacaaaatgcgtcgccggcgtatttttaatagccgcgccactatcgtttgctaaaccggcagctagtccggtgatgaagagtactaggaaaacgattaaaaagatgataaaactcagtgcgccaaattttaacttattatggcgtaattcttggattgttagaaacatatgccgacctccgatgacttgttattaaggctactataacgatggttagttgattcaacaataatcaatctaagtgtttctgtgttataatgcacacaagttagtcaattgtgatgtaaatggaggctgaaagatggttaatctgcaagacagacgggttaaacggacacataagttaattcgcacaagttttattgagctcctgctaaaacacccaattaatgagattacaattcagatgattgccgaccgggctgatattaatcggcggacgttttatttgcattatacggatatctacgatcttttaagccagacagaagattttaccttaaatgagttcagccagttgctagaacgttttgagttgccttctgaaccacagattgttggccaaactttctttagatgggtcttgtcatatgtgcaagacaacgagtctatgttacgggtattgtgtcgtaatcccgattcacagttaatgaataaattagttgcgttgaccgtgactcacggcaagcgggtgattccatttcagcagccggaaaacgctgattatattttgaattattgttgttggggtctaatcggtgttttgcacactgcattgtttaaaccagcgtttgacgcccagcaattggcgctcgttgctgaacagttattgaatgcttctttacaagtcagcgaaattaaagcatagaaaaaagcccaccggtaaataaatgtcggtgggcttttttctattttattttgctttagcagcttttaattgcttgaggttaacaacgatcttgttgtttaattccgaaacgttggccttgtcggctgcatcgaaatccgtaatgctaattaaagcggagttttcatatactttttcaacagttcctgtaaatgcaccatctaggtcttcgttcactttgccggttactaaatcaccgatattgagattttctttatccatagccaaaaactccttcagacattattaaaattaccaaataaggtgataataaactatgtcatggtaaatagcaagacttactgctataaattaatcgtttgattgtgaatgaaacgaaattggctatttaattccccatctaaatacgctaaaacgaagaagtgttaccggttacaaatcaaaattgaggggaattcatatggaaccttacttagttttttcagatattgatggaacgttggtccttgaccatcaaatcgtgacacctttgaccaaacgcgtgattcgaacattacaaaaacgcgatgtgattttctatattgccaccggccgaatgtacaatcttggccgggtaatttcgcggcaaattaacgatgatgtccggattgtggcttctaacggtgctgtctttgaaaatggccatcagatgaacaagcattatttaggtaaaaaagcgctcaaagctgcttacgaagcatgtttagcagatcccaatttatctgcgcacttttttaccactgacacagcttactatacccaagaaatccccaagtttgttgcgcgcgatgcggggaatttattgttgaatgccgatattgataatcaaccggtgactgatttagaaatgttgttgaatttaagtgatcagattactaacgggattatcattggtcgcggtcatccagagagtttagcagccgctaaacaacgattaatggatcaagctgtgatgagcttgtcttcttctggtccagacaacatcgagatgattccaaccgggattgataaagccactgcaattcgccagattcaaatgattcatggaattgatgccgatcatacaattgtctttggggatgggcaaaatgatttgggaatgttgcaatcagcgaagtacagtgttgcgatggacaatgccttaccagaggtcaaagcggctgcaaattatgtaacagaaacgaatacgaatgacggggtcgctaaattcttacaacaacattttgaattagcactttctgatacagaagttggtctctaggggcttgacccgctttttatttttcgatatacttatatcacggttgttaatcaaccgtgaaatgctgttttagctcagtaggtagagcatcaccatggtaaggtgggggtcgtcggttcaaatccgataaacagcttaaaaaaagagtgtgactcgaactgggtaggctttgaggattaacagggaaaagggcattatggcgggacttgccataatgccctttttgcagttaaccggagaagactgttcgaggagcacgttaaaaaatgagtgcattcaagcttggtcaacttttgagcattaagtcgagaataaaaggcggacaacatttctaacatgttgtccgtcttttttaggcttttctggttaataaacgttcagttaattgttgtagcgttgtttttgcgggcatgtcgggtagtttcgcaagaccagcgagtgcgcggtttgtgtaatcttgtgcgagtgcttgggctttttcgacacttccagattgacggacgatgccttgaacagcgtgcacatcggcatcagtcatagctgcttgtttttccaagtagggtgctaatgtttggcgattggattgcagtgccatgattaacggaatcgagtagacgccgcgtcgcatgtcatcgagaactggtttgccaaaatcgacatcggtctgagtgtaatctaagatatcgtccagaatttggaaggcgagaccgatatttaagccgattttctcggcttggcgggcaaacttcaagcctttttggctttcgtaagcaccgatgaagcaactgagcgcgaacagttggccggttttaccgttaatttgttgtaggtactgttcgggggttaaatcgagattatatcgggttgtcatctgactgagttcaccgtcaagaatttgatccatcgtttggctgttaaattggatgctcttcaaatcgctcgcataattggctagtaacttgaagcagacaacgaataagtagtcgccagcgtaaacggcgacatctttgccgaaacgggcttgaatcgattcttgatggcgacgtaaattggaattatcaacgatgtcgtcatgaattaatgtcgcagtgtgtagcgtttcaacagcggcggctaatgcgatcatcttctgtcgatcgactgcattaaactgtgaaaataataagcagtaagcagggcggagcaacttgccgccagcactaatcatctttaaaatggcgtcggtgacggcttgatttttggtgtgaatgttgtcttcaatgagcgcaagactttgcgcaagttcggtttcgatttctggatagttctgccacatggcatgtactttcgccataattaactccttgttaaattaaatttcgtgttgggcttttaaaaaagtcagggttttgacatgttcgaataaaaaattcgcggctacgccgaccgcaattccggcgagaataccgagaaaagcaagcactggtagatagaggaggacttgccaactctgggcaatgaaactcgcgacgcagagttgaccgacattaaagagcagaccaccagcagctgagatgccaatcatactcataaagcggcggctaaattgcttgaggagtaccatgccaaagaaacttagcgttgccccagcaatgctatacataaaagtagagagggttccccctagcaaggcggataaaacagttcgcatcaccatcaataaaaagcagtcgctgaccggtagggtaaataacgaaatgatggtaattaaattggctagtcccaacttagcacccggggctacggcaaatggaaatggaatcgcgcgttcgacaaggccaataataatcccttgagcgcacaagagtgcaatatagatgtatttacgcgtttgatcgttagtcatcgctgtactccttttaaatcaggcagaaaccatcccgcccgtgtcggtcccatccttggctttaatttcaatcagtaacttgtgtggtaagcaaacaatggtttggcctggcttagaaattttgccacgcttaacatcaatctgattgaagcaattggcttcagtgacctcaatggcatgatcggttaccttaattttgttgtaatcaccgccggcatcgcgataagtgaagtggctaacaccatggtgggtggttaggttcactttgtagacggttttgccatcgtgtttgacgtaggccgtcaatacctgcgcgtttgaatccgctgcttgcgtcgtttgccattcgtgccaactaaaaacagcaactggggcaaacgatagaataaacaggccgatgactactattatatcaccagggcgaatcattttgatgtaacggttagcgcgaatttgtttaaacataggcgtcagtctttctctctaaaatagcaataaaaggggttatgacaaaagcctgtctgtcataaccccctccttttgatagctgtgaattgcttttataatgtgctttcaaaagcattctattgcgtttagcactattagccaaacaactagctacgctagttattcgtctaattttgctaatccgcatagaataaacgcttttgacgcactcagttttataacgtgctttgaagttaactttctgcgtttagcgctgtgaatcaaatcatcgactatgtcgctaattcgcttccctgtgctaatgcttaaagtcaaaccgtttcaaacgcactcattgatttttgtatagtgcacgttgttggccgtagcgccagtgaccgagatgtttttgtaaatatggaacaacccatttatctaatccgaaggcacggcctgaaccgttcatgcaggcgagggccattggaataatccaaatgttaacccaatagaacatccctgaaaggcagaatgtgataaccattgcaacggttactgcgctcgttaaccaagtgaagagaccagcaattaaagctaagccaattaaaatttcaatgatggtcattgttttttgcatgaagaaggcgacttcttggtttggaatcaagaccttcgtgatgctgtagaaccagtggggcatcttatcgaagacgggcattggatcatgaccgaataagtaagaaaggccgaatgtgactttagcagttgctggttcagcagccccgcctgcagcggcaccgctagcagcacttgttgcatccgccgctttagaagcaccgctggtgacagctggttgaagccagtcaaaaggtaaccggagcttattggtgaaccaagaaccttcaccttgaaccttgtcccaacaatcaacaagccacattgcgcctaagaaaattcgcgcaggaactgtccataaaacattaccataccgtgaaatatgaccgcgcatcaagttgcgatcgttcttcgttctgaagaactcattcattgaatagtggaataaatcgtagccagaataaatctgaacaaaatagagcatgttgactaaatgtttaactaatgtggcaaagaacccactgagatggaagaaattcatcaagttggcaaccgcatagcgagaaccaattgaaaccatgaagccggaatagctccctttgtatgggacttttgctttaccttcttcagttgcgatgatgttctttagggctgttgcagcagatgcttcggcgccttgaacaatttggggttgaccgcggccgtcatcagtttcatcgaagaaagccacatcgccgacaacgtaaatcttgtcatcgtcaacagattgcatgaattcgtttgtcacgattcggccggctttaccggttgttaggccaaattgtgccgcttgtgaggaagctttgacaccagctgtccagattagagtggcagttgggaaagttgaaccatcatttaaatcaacatgcatttcgtgaacacctgtaacaccggtattcttgcgaacatcaattttttgtttagccatgtagcgttctgctttggctgcatcgttgcggtcgagcatgttcatgatggttggtgccatttccatcattgtaaattggatttcttcgggatcaatcttgttatcagctgctagttcatcacgccagtcgcgtaattcgccgatagtttcagttccggtaaagccagaaccaacaaccacgatattcaaaagggcccggcgtttttctgggtcgtgttcaattgccccacgacgaacaacatcgataatatgttgcttcaattcaacagcctgttcccatgaacctaaagtgaaaccatgttcggcaaccccaggtgtgccaaagtcgttaggttcactcccaatccccaacataacttgatcataggcgtagcgtccatgttcagtaatgacggttttgtttgcttgatcgatgcgggttaccgtatcggtcaccaacttaacgtttttgcggcgacagaagagatgttgcaaatcgtgttgaacgtggtcttctggcacgcggttagcagctacttcgtgtaattccgttaaatacgtaaagtaggaatgtttgtcgattaatgtaatttgataatctggattcttcttgtaatatttcgcaagttttttagtcgcatagatcccggcaaaaccggcaccgatgatgacgatgtttttttgagccatgatgagccacccctaaatgaaataaatgcgttttcaatcagtatccattatacagaataaactaaagattgtctatttattcacggataagattaatgggattgatgactattaaggaaaccgttttaaattgtgtaaaaccaaagttaatcgccgtaaaataagtgatttaaaagacttgaactttttacataaaaaagataaactgactttgtgtgaaggttgatacaaactatatgattatttatgaaaagggcgggaaaattatgaaattaagtaaagcattagctagtttatcagttgttgcaatgtcagcaatggtattagcagcttgtggtaatagtaataacgctaaagattcatcttcaaaagaggcaaaatctagttcagtcaaagaatcatcaagcaaaaaagcaaccgctaagaaacaagttgccggcggtgaattaaaagacggcacttacaacttagaagaaaagaactacgaaaataattatcgcgttaagatgtcaatgaccgttgccggcggcaaagtgacaaagacaacttacgattacgttgataaagatggcaagtcaaaacaagatgacaagacatacaacgaaaaaatgaagaaagtttcaaaaacaaatcctaaagaatatattcctaagttgaacaaagaatttacagataaaggtgcagatgtttcaagcatcgaagtcgtatcaggcgcaactcatagctcaaattcatttaagaattacgcacaacaattagtgcaagctgctcaagctggcaacactgaaacaatcgaaatcgacaatggtgctaagatgcaagatggcacatataagttagaagaaaagaattacagccatgactatcgaacagttttcacaatggtggttaaagacggtaaaatcactgaatctaaattcgataacatcaataaagatggcaagtcaaaagctgacgatgctgcatacaacaaacaaatgaagaagattgctaagactgatcctaaggaatacatcgctaagttgaattctgaattcgtcaaagcacaagaaccaggcaaagtagatgttgtttctggtgcaacagaatcatcacacagcttcgtcaactatgctgaacaattagtcaatgctgcacaaaaaggaaatacagcaacgattacagttgataacatcgtttacggtgaataaaacgggacttcggcagtcagctgccaatgaattaatgggtaactgtctgctagaaggtacgatgaagctaggacaagtcaatttgtcctagcttttttaatggaaggaagtccgagatgtcttttaaaacgtttttagaatttgtccggattgaggccaagacagcgagtgtcttgcctttaatcttagggattgtttattgttggtacgttaatggccagctgaatccagtgacgacagttgtttattttgtcgcccagttttcgattgcattatttgtgactggctttaataatgtgatggattactacaaagcagttgatctggattatcgggcacagacgaatatcattgggcgcaaacatttgtcgccaaccaaggcactgcatttaatgctctattttttattgttcagcatggcggctggaatttggttggtttggcaaacgaatattttattactattaatcggtggcgcctgtatttttgtggccgtcttttacacgttcgggccagttccgctgtcgcggatgccggttggtgaattgttgagtggtgtgacagaatcatttggtgcattttttatcatggtctatgtcaacgtaccaagcgacagcatcatggcgctccattttgattggccgacgtttacccttaaaggtcaattaccaacattgcttagtttatgcctaatcggtgtgattattgcaatccccacttcgaacattatgttggcggataatatctgtgatctagatcaagatcggcgcaatgaacgttatacactgccgcattatttaggaacaacctgggcgttgcggttgtataatacgttgatttggttctcactagtggccgttgttgtggcagtgattacgaaggtcttaccgattgaatcgttactattgttattattgattcctgtcattttacgcaataatcgccggtttaatacgcggcaactgaaggatgtcacctttattaccgcgattcaaaatgcgatggcgatcaatattagcttgattgtcagcttgttattagcgattgtccgcacgacctggtggggataatccaccacattgacagtttggtcaacacatgataaagtaaatgggataaacgtcaattagagaggggcttttcatatgggtgttaagaaagtcgccttagcctgtactgtctgtggctcacgtaactactatgttgctgagaacaagaatcggacagaacgtctagagttaaacaaattctgtaaacattgtgggcaatactcacaacacaaagaaacgcgctaattaggaggaaataagatgattaagttttttaagagtgttggtcaggaaatgaaaactgttagttggccagatgccaaacaaacacgtaaagatacatcaacagtcgtcatgacctccgttttattcgccattttctttggcgttgttgattttgcaatcttaaaagtactacaattatttatcttttagaactggcttaattaagccggatttgctatactaatggcaagcaaaaaacttcgcgtggtcggagtttttttattttggtatttaaaaggagaacgcacatggttgaatcaatcgaaaaaagctggtatgtcttacacacatattcaggttacgaaaataaagtgaaggcaaacttggaatcgcgtgcccaatcaatggggatggagaacaatgttttccgcgttgtggtgcctgaagaagaagaacatgaaatcaaaaacggtaaggacaaagtcgacatgaagaagactttcccaggctatgttttggttgaaatggtgatgtcagacgaagcttggttcgttgtgcggaatacaccaggtgtgacgggcttcgttggttcacacggtgcaggtagcaaaccagccccattattagatgatgaaatcacacaaatcttgcgtcaacttggcatgagcactcgtcatttggatgttgagttcaaagtcggcgaatctgtgaagattatcgaaggggcctttgctggccttgtcggtcaaattacagaagttgacgacgaaaagatgaaattaaaggttaatatcgacatgttcggtcgtgaaacagcaacagaattagactacgaccaagtagacgaactagtttagagtgcgacttcagtcgggatgactgaaggagcacgtttcgaaaaaagagtgcgtttgaaacggattgactctgagcattaacctaatttggcgaattggtgctacaagcgccgatttgacaaatgtagttaagcgcaagagtcagtttcaaaaagcacgtttcaacaattaaagtagggggctaggatttgtcccaagccccaacaagataggcggctgagacgaaagatgatttgtctcagccgctttttttgaacaatcaatagtgtctatttcgaaagaatgatgtgatgacgatgtggtatatcattgatcaaatattaactgcagtgggcttagtcatttttttgttagtcttactggcaggactggatttttacaaactaatccgggtttcggcacattggcggccgtgcgcacgtttatatacaaaacaaccaacgctattcattcatggctatcgggggaatcgctattcattcggtcacttactcggacgcctacaaaaagccggaattgctaagaagagcatggtcatttgggtgggcagaaacggtcgattgcatgtggatggagacgcggcgttgcaggctaataacccaacgattcaagtcttatttgctaataaccgcgccgatgtgcaagatcaagtccgttggttagctgcgattattgaacacttaaaagaagcgtatggcgttacgcaagttaatttagtagggcattcgatgggcgcaattacggtgttgcgttatttgttgacatcagaccatgccgtggtggacaaagtgatattgttggcagcgccagttaatgatccatcaattggtccggatacaccacttgttttttggagcgagttaaccagtcgtggaccagttaaacgaacacgtaattataattatttagccgtgcgggccaagtattttccaactgcgatcagtgtcttaaacattgctggcgagttactaggaactaatcgacacgatggttcggtagcagtcgatagtagttttgcattgcgtagcctattaaaaggacacgtgcgccattaccaggagatgttagttcgtggaccgggtggagcacatagcatgttgcacgaaaatcgtttagttgatcaagccattgatgatttcttgtggcgcgattaatggaatcgccttgctttttcggcaattgcttggtatattattaaggtatgttttcatacactagtgggagaccaaatataatggccatcttaaccacatcacggacttaaggaggtatgtttcgtggctaaaaaagtagcaaacatcgttaaacttcaaattcctgcaggtaaagcaactccagcaccaccagtaggtccagctttaggtcaagctggtatcaacattatgggctttacaaaggactttaacgctcgtacagctgaccaagctggtttattaattccagttgtgatcactgtttatgaagatcgttcattcgactttgtaacaaagacaccaccagcagcagttctcttgaagaaagctgccggtgttcaaaaaggttctggcgaaccaaacactaagaaggttgcaactgtaactaaagctcaagtgcaagaaatcgctgaaactaaaatgcaagacctaaacgctgcagacgttgaagctgctatgcgcatggttgaaggtactgcaagaagcatgggattcactgtcgaaggttaattcatgcttgacactttcagtcggattttcaatgaaagttgaaaaatcaagtgggaggtcaaaaaccgttcaccacaattgcaaggaggaaaaccctaatggctaaaaaaggtaaaaattatttagaagctgcaaagcaagtggatgctactaaagcatacactgttgaagaagcaatcgacttagtaaagaaagttgattttgcaaaattcgatgcatctcttgaagttgcatatcgtttaaacgttgatcctaaacaagctgatcaacaaattcgtggtgctgtcgtactaccaaatggtacaggtaagacacaacgcgtgattgttttcgctcaaggcgaacaagcaaaacaagctgaagctgctggtgctgacgtagtcggcgcagaagatttagttgaaaagatccaaggcggctggttagactttgacgttgccgttgctacaccaccaatgatggctcaagtaggtcgtttaggccgtgtcttgggacctaaaggcttaatgcctaaccctaagactggtacagttacaatggacgttactaaagcagttaacgacattaaagctggtcaagtggcataccgtgttgataaagctggtatcgttcacgcaccaatcggtaaggtatcattcgatgctgctaaattagtagaaaactttaaagcgatgcaagacgtgatcatcaaagctcgtcctgcttcagctaaaggtcaatacattacaagtttatcagttagctcaacatttggccctggtgtcaaagttgacgttgctagcttctaagttggtaatgcaaaaagcgctcatccgaaaggatgagcgctttttttgttgctataattaagcattaatgtcgataatttcgaattttgtgacatccactaaacctttatctgtaatccgcaagttcgggatgacgtcgagtggcattgcgccgagcttcataatcggatcgaagtgagcggtgacgtggagtttatcgtggcaaatagcattgaaggccttttgatgttcaattaaagtgtcgatgggttcgttactcattaagccgccgatgacaaatggtaatgttgcgatgacttggccatcccgaatggcaacgccaccgccttggctttctttgagcgcttcgatggcaacgaccatgtcagcatcgttggtaccgactactacgaggttgtggctatcgtggccgatgctggtggcaatcgcaccgttcttgatgccaaagccgttaagcaggccaaccccgacattaccagtgagatgatgtcgttcaactacggccactttagcgatgtcttcgtcaggatgatattggaaatcaccgtctgcagtgtgagcgaccggtaagacgagattttgtgtccgactgatgctttgtaagccgatcacgtgggctttatcgcttgtgaggttgagttttaattggtcagcggtgaatgtatcgaggtgtacggtttgtaacaagtcatcaaaaccagtaactgaatcttcagttgttagtaagtattcgccgctagcagcaactttttgaccatcgatgaaggtttgattcacactgaattgttcgagatcatcaaccaataggaaatcggccttcaaaccaggtgcaatcccgccgcggtcagctaagccggtgcattgggcagtgttgatggtggccatttggattgccatgatggggtcgatcccgtttgcgatagcaacgcggatactttcatccaagtggccggtttcacggagggttacggattgtaagtcgtcaccgcagagacaacagaaacgtgcgttttgcggcgtcacgcctttcaaaagggttggcatattcttagagacggtgccgtagcggagataaacatacataccgcgactgatgcgatcgagcatttcatcgacttgggtacattcgtgatcgttacgaataccagcagcggcatatgcgtttaagccttgttcttttaaagcgggtgagtgaccgtcgatgagtttatttgcgttgagtgaaacgagtaattcgtctaaaacgccatcatcagcattgacaacaccgggataattcatgaattcggcaaggccgtaagtgagattgcggtcgtaagaatcttggatttcagcagcggtaatcacagcaccagatgtttcgaggcttggattagcagcaggcacacacgagggcatggtgtacttgatatcaagtgctgtctttttggcagatgcgaccatgtattcaagcccccgcatgccagcgacgttcacgatttcgtgtgggtcggccaagatcgtcgttgtgccatgtggtgttacaagtgatccgaagacagcgggtgagacattggcagattcgatatgaatatgcggatcaatcaaacctggcacaacatattggccgcgtgcatcgataacttttggtgcaaggtagtcgtcgctgataccgaggaagcgaccattaccaatcgcgagtgtgccttcgataatacgaccattgtagacatcgacgatttttgcatttttaatgaccatgtcggcagcttgacggccagcagcttgatcaattagttgttttaaagttgttttatccatgagtaatctcctttatttagcaggtaattcgtgcattgtgaagagtaataataggaataagagcgcagcgatatacataatcggatgcacttttttacctttgccagcagcaatcatggtgatggggtaagtgatcagcccgaatgctaaaccgtatgagatattataggttaatgggacgcacagaataatcatgaaggctgcaaaagaagtttcgaattctgaccagtcgatgttgacaattgacttcatcatgaatgaacccacgatgattaagattggggcagtcacttgcgacgtcacaacggccagtaaaggtgagaagaataagcttaagacgaacatgatggcgacgaccacggcggtgaaaccagtccgaccaccagcagcaatcccagttgatgattcgatgtaacaagcagttggggttgaaccgaaaacggaaccggcaatcattgaggttgaatcggcgaaaagggctttgccgacttccttaggcatcttgttgtccttgatgaaaccagcttgttgagcaagtccgattaccgttccagttgtatcgaagaagacgctgaagaaaaagacgagaattacgacggccatttgaacattgaagacgttgtggatgttcataattgagacaccgaaagtgggtgctaagcttggaattgaagcgatgatgctgtgaggcattgcgattagaccagtcacgactcccatgatggctgtggccgccaaaccgatgaataaagcgctagggactttgcgggctaataaaacaatggtgacgattaaaccgaagacggtcaaccaaacgtgcggatctgaccaactcgtaatggtgacgaatgatttagcactaccgacgacgatgcccccttgttttaacccggtaaaggcgatgaataacccaatcccaacggccatggcggcttttaaattagcgggaatcgcgttaatcacgacttcgcggacttttaagaccgtgacaagcatgaaaaggagggaagcgacgaaaacaccggcaagtgctgtttgccaaggaattcccatgcctaaaacgacggaataggcgaagaaagcattgctgccgagtccgggtgcaacggcgattgggtagttggcgatgaaggccatggctaaacagccgaccactccagttaatgcggtggcgacaaagacggcccccttatctaggccggcgtcgcctaatatagttgggttgacgaataaaatgtatgacatcgcaataaaagtggtaattccggcgatgatttcggttttaatggtcgacccacttgccttaattttgaattgacgttcgaaccagttcgttcgtgtttctgttgcaatatcaatattcttatccattatgcacttctgaattagtattttaagaaccttggcattattgtacaacaaaacaatcgtgtttttaagaagaatatgaaaaatgtttattattttgtaaatattgttcgttatttggtgatgaaaagggtttattttatcaaaaaagagccattagcgtgaaaaacgctaatgactctctcataattcgcgattaatttagatggttgttaggacgtgattagcaatcgccaattcttcgttggttgggatcatcaagactttgatggctgaatcgggggtactgatttgacgggcacctgagccgttttcgttcaattcaggattgatttgaacacctaaaacagccagcttggcacagatatcagcacgtaaacgggcgtcgttttcaccgatgccggctgtgaaagtgatgacgttcgcaccaccgagttcaacgtggtagctcgcgatgaacttcacagcagaagtgataaacatgtcgtaggcgagtttagcccgtggattggtagcgcgtgttgattgaatatcgcgcatgtcagcggaaacgcctgaaacgccgagaatccctgatttggcgttcaaaagcgtgatgacgtcatcggcactcttatccaattcgttcattaagaatgggacgatggccgcatctaatgaaccagcgcgagtgcccattggaatgccttctaacggtgtgaagcccattgatgtatcgacaggcttaccattttggctggccgtaattgaagaaccgccacccagatgaagtgtaattaattttaaatcggcaacgggttctttcaaaaagtcagctgttgcttgtaagatatagctgtgactaatgccgtgttcgccatacttgcggatttgatagtcttggctgtattcataaggtaagccataaaaactagtttcatctggcatatcgagatagaattgactatcaaagacagccacttgagggacattagttggtaaaatatgcatcaaggtttcaatgcagtcaacttgcacgggattgtgtaaaggtgcatacttgtcgagttgttttaatgtatctaagttggtgcgatcaataatggttggtttttcgaacgtggtagcaccggcaacgacccggtggccgactgcaatgatgtctgcgggtgaatgaatgatgccattgtcttcaagttgtttcaaaagtcgaagaacaccatcttcataggaaagattagcaatggcgacttgttctttttgaccttggaacttgaaggtgaagctagcttctggtgtgttcatgcgttccatgagcccgcttgccagtaaggttaaatcagattgttggaatagttgccatttcaatgatgaactacccgcgttaacgactaaaatattattcaaaaaactgcacctcttacgattaattttcttgatagtctcaattttaaaccgttttttcagaaaaataaaataagtaaaacgtaatgctaggataactaaaattaagtgccgataatgattgacgctttatggaatccatgctatatttgtagttggttatttatgctaccgaagactcaggtgccaataggcttaatatcctgccgaggaagatacgttgaaatccctctctatgtcttggtggacatggagttttttatttttataaggaactcttgaccacaagttttacaaatctaatggaggtgaatcaattgagcgaaacaatcattgcaaaaaaagcacaaattgttgacacagttgttgaaaaattcaatagtgctgtttctatcgtcgttatggattaccgtggcttaacagtagaacaagtaactgaattacgtaaacaattacgtgaagctggcgtacaaatggaagttgttaaaaacacttacttgcgtcgtgcagcagacaaagctggttacgaaggtttggatgatacattcacaggccctacagcagttgcattttctaacgaagatgttgttgcaccagctaagatcatcgctaactttgctaagagtgctgatgcacttgaaatcaaaggtggtatgattgaaggtaaagtggcaacacttgatgaaatcaatgccttggctacattgccaagtcgcgacggtttattatcaatgttactttctgtattacaagcaccagtccgcaatgtcgcatatgctgttaaagcagttgccgacagcaaagacgaaccagctgcataatttaaaattgtgtagttaaaagtgttatcaaaaaatattacccacaaaatggaggaaacaaaaatggcattagacgtaaatgcaattgttgatcaattaaaagaatcatcaatcttagaattaaacgacttagttaaagcaatcgaagaagaattcggtgtttctgcagcagctccagtagcagcagcaggtgcagctggcgcagacgcagcagctgaaaaagacagctttactgttgaattatcagaaatcggccaagaaaaggttaaagttatcaaagccgttcgtgaaatcacaggcttaggcttgaaagatgctaagggcttagttgataacgctccttcagctcttaaagaagacgttgctaaagacgaagcagaagaaatgaaagctaaattagaagaagttggcgctgtcgttaacttgaaataatttaaatagagcgcccttggcgcttgtttagattttgagcactaacctaaaatcgggcatcgtggcgatctaagccatgatgcccgatttgtagttaagcgcagaaatctagcgccaatggcacgtttcaaaataaagtgcgtcattaacgggttgtttttgagcatttgcctaatcagccggtgatttgactgatgtagcaaagcgcagaaagcagttaatgaaagcacgttttatttctaaaagaaccccactaatgtggggttctttttttacatatttttttgtaaaacataaatggcgagttgcacaaaataacacgatgctaaatatggattccatatcttaagcgacagccattgctgttgagaactaaaaaggcaatcagaggatattgattgtcgggtgaacgggaatcggattgtgctccgggtaagtaataagcgaaaatcataatctaacagccatctaacataattgtcattttactgtgttttgccttgggatagcttataattaaattaattaagttaaggagcggttgatatgcgaaaatggggcaaacacatatatgaaggaattcagcgacacctaacgttgttaaaaggcatcttcatcctttcggtgatggtctttgttatcctagaagtcggccggattttccgggacttgaacggggaacaattgaaagcgagtttaacgacacaaagtccgtggaccttgctagcgatgctggtgattgggtttgtggcggtcttgccaatgctcaattatgatttcgtgattgcggagttgctgccggaggactattcattctggtataaagtcaaatctggttggatcgtcaatacgtttacgaacattgccggattcgggggcttcttaggtgcgagtttacgggccaatttctatggtaaaaaagcgtcacaaaaagaaatcttaattgcgatttcaaaaattgcgctgttcttattagccggcctgtcaatctggtgtctgattagtgtcgttttgatctttggctttggtattggtgggatgtatgccaactactggttatggctagtgggcggttcgttgtatttccctggtctgatgattagtacgcgctttaaaaatgcggcctttttcaaagatctttcgatgcaacgcgttttacgcctaacattagggtctttcttagaatggggttttgcgggcggctttttcttaacgattggttatttcttagagattaagggtgacttattacaagtcttaccacttttcatgattgccaacatcattggtgttatttcgatggtaccagggggcttaggaacgtttgatttgttcatgatctttggtctgagtgcagtcggcgttcaaaatgcggacgccgttgtctggttgtcattttaccgagtcttttattacatcgtgccgtttttagtcggcgttggtttatttactcacgatgcaggcagccggttaaatcattatttacagggcttacctcggcaggtgatgcaaaaaatcgctcatcacttcattgttttcttcctttatatttcaagcatcattctattattagtagcaactgtcccgaactttgcgattaccaacacagtgattggacagctctacccatacacgttcttcttcttagatcgtgtgacaaacatcattgtagcgtttgtcatgttggccttagcccgcggcgttgccaaccgcgttcaaaaagttttctggccgttgatggtgctattggtgattgcgattgccaatacactatggcgggatttctcaatcaaactcgctgtctttttaacttttgtgctcgtagctagtttcttattgaaacgcgaattataccgtgaacggatcgaattttcatggaatgatcggattgtggatggtgtacttttcgtgggcgccttcttgttatacggctttgttgggattgccaattcgccacacttacggcatcgcaaacccgtaccaacagcgcttttatttccatccgaaagagtctggttggctggttttatcgggatgttggttgccgcagggaccttatatctcgtctaccgttatctcagtcgagggggccgttcaatagcagcgccatatgatgaagcacgaattgctaacgtgattaacacttacggcggcaatgaggtcagtcatttggcatacttacgggataaatcagtttatttctatcaggaagaaggagaagatcaggtattcttgctttatcgtaaaaaagcggatcgcttaattgtaatgggtgaaccagtcggaaatccggctaaaattttaccggcaattgaacagatgatgcacgacgctgatttgattgattgtcatttagcgttctacgaaatttcaagtgaattaacgatgcaactgcatgaaatcgggtttgactttatcaagtttggtgaagaaggctacgtccgtttggcggacttcacgatgactggtaagaaacggcgggctgaacgcgccttaatgaataagtttgaacgtgaaggctatcaatttgaaattttaaacccaccatttagtgccgaattaatggcagaactcaaagcggtttctgatgattggttgggtagtcgcgttgaaaaaggcttctcgttaggctttttcgatgaagcatacctccaaaaagccccaattgcagttgtctataatgccgatcaccaattaattgctttcgctaacgaaatgccaacaggaaccaaagaagtcgcaagtattgatctaatgcgtcacagacaagacgcgccatctggtataatggatgagatctttattaatctctttgaacaaaatcgaacggatggctacacgtacttcaacctcggcatggcgcctcttgcaaatgtagggacttccgagtttagctttattgaagaacgaatcgctcatctgatctatgaatacggctatcacttctacggattccagggattacggacctataagaagaaatatacgacggaatggcgttcgaaatatatcgcttatcaaaaacggacctcattaattttcacgatggttcaagttttaatggtcgttaatcaacgggttgcggatcaaccgcatcctggtggcttgctaggtcgtttgatgaagtcagttcaaattgggaaattttcagataactaacgacaaatgaggaaaaaagatgacagagtattactattctaaaaatccagacgttgaacacgctgagcggcaatggacgtttgaattacgcggctttaattttaaatttacaacggataacggggtattctctaaaagcactgttgattacggttcacgggcattgctagcagcggtcgatctgagtgaagcgccagctggtccagtgcttgatatggggtgtggatacgggccaatcgggatgacgattgctaagctcgcaccagagcgccgaatcgacatggtcgatgtgaatgaacgggcattggatttggcacgtaagaacagtgaattgaatcagattaccaacgttactgtattcgaatcagctgaatatcaaaacgtaacggatcaatacgccgccatcttcaccaacccaccaatcagagcgggaaaagatgtggtgcaaaatattttgactggtgcctatgatcacttattaccagatggtgaattgaacgttgtgatccaaaagaaacaaggtgccccatcagcgaagaaaacgatgatgagcatttttggcaacgtgcaaattattcataaggataaggggtattacattctccaaagtattaaattaaagtaaggaccggggttgaaagcggtaaattcaggcgaattgtgctaaactatgattaaagtacaaggaggttgatacgatgaaaaccagatataaaattttaatcggcgtaggggtgactgcagcagttggcgcaacgaccgcttttgtcggttctaaggcagtaatcgataaagtatcgcgctatcgcaaacgattagcagttaaaagttttgtaaaagacaaattacatggtaaccaaaaggcgttagagttggtcgatcaactctccgatgcggatgtgaataacttgttgactgcggcagacaggttaacccaattaaaagataagcttggcgaacacgcagacaatctaccagatatgatggatgatttgcgccaaacactaatggcttacgcaacaaaggtgaaagaaaaactatagagtgcgactcgagttggtcaggctttgagcattaacagtgaaatgagcattatggcagtccttgccataatgctcattttgcagttaaacggaagaggatggcttatggagcaattaaaaatggtatcgacaatccgtcggcaccatttttaattgctcgactagcgcgactgtgttttaatagttgagaagtaaaataaaggggcgactaacgcgtgagtgaaacacaacaagagatcgatcaatggatgcaagccgccatcgatgaagctaaccaagcacgcatcattggcgaggtaccgattggcgccgtgattgttaaagacggacaaattattggacgggggcataacattcgcgaacacgcgcaagatgcgacgttacatgctgaaattctcgcgattcaagaagcctgtatggttgaaaagagttggcgtctggaagataccgcgatttatgtcacgttagaaccatgcccaatgtgtgcaggcgcgattatcaatagccggattcccaaagtttattttggcgcgagtgatcctaaggctggtgtgaccggcacgttgatgaatttattaactgacaaacggttcaatcaccaagctgaagtggttggcggggtgcgagaagctgaatgtgcgagtttattgcagactttttttagaaagattcgcgaaaatcgccgtaaaaaaaaagaaaatggctggtaattaatgcttgaatcaggtagaataggaattgccgaaaggccttgagacaatgatgagcctacgaatcgtgtcaggttcggaagaaagcagcactaagtttgttttatcatgtgtcttaagttttgtgaaaattaaccagacccaacggacaattaattttgtcggttgggtcttttttcatgcaacgcaatcaaaattgacggtaaaatatgctaaaatggaacaagtagttttaaatgaatcggactttaaattgcaaaggtggaggtcattaaatgagctatcaagctttataccgggtttggcgcccgcagcgtttcgatgacgtgattgggcaagaaacaatgacccaaacattgaaaaatgccattatgacgcaccaaacaagtcatgcttatttatttacaggcccacgtggaacagggaaaacatcggctgccaagatttttgccaaggcaattaactgtcattatcaaaaagatggcgaaccatgtaatgaatgtgagacatgtcgggccattacggctggcgccctcaatgatgtgattgaaattgatgcggcgtctaataatggggtcgaagagattcgtgatattcgggataaggccaaatatgcgccgacccaagctgattataaaatttacatcattgatgaaatccacatgttatccactggtgcgttcaatgcactgttgaagacgttggaagaaccaccaacaaatgtggtattcatcctcgcaacaacggaagttcacaaggtgccagcaaccatcatttcgcggacgcaacgctttaattttaagcggatcacggccgctgatttatttaagcgaatggcttatattttagatcaaaaggaaatgacctatgatccagcagctctgaaagtgattgccaaagctgctgaaggtgggatgcgggatgctttaagtattctcgatcaagtgttatcctttagcgacaatcacgtcacgttggataatgcgttggatgtgacaggcagcttaaccgaagcgttgttggcggattatgtccaaacaattcaggataatgcgcctaaacaagcgttgcaattgttgcaacagattttggctgaaggtaaagatgcccaacgttttgtggaagacttaattgaatatgtgcgcgacttactgttgtatcaacaagcacccgaattagtcgccgcaagtgaaatggatctattggatgaacacttcaaagcgctcagtgcagcgatgccggctgaccgtttgtacggggtgattgatatcctgaatgaaacgcaacagcaattgcgtttcacgaaccatccagaaatctatctggaagtcgcaacggtccgcttgacgcaagtccagacagcccaagtaacgactacgatgggtgccgcaccagctgctgataatgaacaagtcgcagcgttgagtcaacaagttgcacaattacaagcggcgttacaaaaattggaagcggcgggaccagtgagtgctccagctgccaagccaaaggccaaacctgctaagaagattagtaaaaaggtcaaccgtaaggcgatttatccggtattggcagatgcgacgcggaccaatttggagaatctcaaagaagtctggccggatctgttgaatatgttggacgttaccaagcgcgccgtgatgaaggtttccgaaccggttgcagcgagtcaaagtggcgttgtcgtcgcgtttaactacgcgattttattcgagcgagctagcaatgatcaagaccttttgaacattttagaaaacggattgaatcgtttgactggcaaccccttcaaggtagttttagtgccccacgatgtttggccagaaattcgccaggaatatttacagaatcacgcagtaccaagtcaacaggtaacaactgatgacgaagcagaagcaacgccgaaaccagaacaaaaaccggccgttgtcgaacaagcacaagctttgtttggcgatgcggtggttgttaaaaaagattaacgtttaaatttgaaaggaagtaatgaagatgcgcggaatgggtaatatgcaaggtatgatgaaacaaatgcaaaagatgcaaaaagaaatggggcaaacacaagaagccctcaacaatacagaatttgtcggcaaagcagccaacgatttagtcgtggtcacaatgactggcgacaagaagatgaaagacattgccattaaaccagaggccatcgatccagatgatgttgatatgttacaagacctcattatcatggcaactaacgaagcgatgactgaaatcgataaacaaacacaagcccaaatgggtaaatttactaaaggcctcccattttaagtgagacattaaggaagtgcattgatgcaatatccagaaccaattgcgaagctgatcgaaagctacatgaagttacctgggattgggaacaagaccgcaacccgattagctttttacacgattgatatgaatgaagacgatgtgacgaatttcgccaagaacttaatttcggcacgtcgtgatctgcattattgtagtgtctgtggcaacattacggatgaagacccgtgcgaaatttgtcgcgatacaacgcggagtcaagacatgatcttagtggttgaacaaccgaaagatgtcatgtcgatggaacggatgaatgattatcatgggctctaccatgtcttgcatggggtgttatcaccgattgaaggcaaggggcccgatgatattaacatcgccaatttgattaaacgattgcaaaaaacaccggctaaagaagttatcattgctactaatgcaacacctgaaggggaagcaacggcaatgtatatttcgcggttgattaaaccagctgggattaaagtgacgcgtttggcgcacggtttatcagtcggtagcgatattgaatacgcagatgaaatgacgttgttaaaagcggttgaagggcgtcaagaaatttaagaatggtgggtttgcgatgtttggtagaaaaaaaccgacattaaaacaattaggtgatcaagccttattggatttagtgtaccaagtcaaagataaatggcagatggcccaaaagacgcaagacaacgtccgcggactcgatgaccaattagagatggaaagtaagattcaacaagcaaagtttgaattcttattccgccaagcccgccaacgtaaagtagcaggtgaagcagtttcgaaagaagcagcaactagaaatacatttagatagcgcgggcattcagatgacagccgcagcgtgaagacaaggtcgagtgactttgtctttttttatttcaaacgtctgctgtcgcacgctaaacgcaagaacataaccgccggatacgcactcttccctttacgtcttttgttgaatcaagtaaaatggaagtaactctatggatgaagaaggttgttttgtggtaggaaaattaattacgtttgaagggccggatggtgctggtaagacaagtgcgttgatggctgttgtaccgctacttgaatccaagtgcaaccaagacatcattgttacgcgcgaaccaggtggcaatccgattgccgaaaagattcgcaatgtcattttagatgttgaaaatacggcaatggatgaccgcaccgaagcactgttatacgctgccgctcggcgacaacacattgttgaaaagattgaaccagcgttggctgataacaaaatcgtgatttgtgatcgatttgtggatagttcaatcgcttatcaaggggcaggtcgtggcatcggtgaggaagtcgttgcgcaaatgaacttatttgccactaatggattagcgcccgatttaacgttataccttgatgtaccatctgaagtcggtttacaacggattaaacagaatcgacaggatcaatatgatcgattggaccaagagaagttggcttttcaccaaaaagttcggcaatcctacttacaacttgcgcaagataatccagagcggattcaaacgattgatgcgaccgcagacttagacacagttgttgccaaatgtctgcaagtgattgaacaacgatatccagacttattcacagcatagaaaaggggagattgaaatgaaattacttttagcaattgttcaagataaagatagcaacttattaagcagcgaattaatcgatgccaacattcgggcaaccaagttgtcaacgactggtggcttcttaaaatctgggaatacaacgtttatcgtcggaattgaagacgaacgggttcctgaagcgcttaagattattgaaaaaacgtgtcaggcacgcgaacaattcatgacaccgcctgttaatatggatgccacgatggatagctcaatgtcatatccgattgaagtgcaagtcggtggggcaaccgtctttgtgatgccgattgaacagttccaccgcttctaatcgatggccagtttaacaattgaacagcttcaacccaaacttgtggcccagtttgcccagattatcgcgcgtggacagatggcgcatggttatctattagctggtgcacagggattggggaagacacaattggcacagtggttggcactgcgtctgttctgtcaacaagtgacaccagatgggcaaccttgtcggacatgtccggaatgtcagcggattttgacgcataatcatccggatgtcattgaaattaagccggaaggtaagagtattaagattgccgatattcgctatttgaaacaagaagtggctaagagcgggatggaatccagtcaacgcttattcattattgaagctgctgaaacgttaaccgccagcgcggctaatagtttgttgaagttcttggaagaaccggcgcaaaatgtttacgcgattttatgtacgagtaataaaaatcaaatgctccccacgattttatcacggcttcaagtgattgatctggcagcattggcaccacaaatggtgcaacaacagtttgaagcagctggtattttgccacaacaagcgcagttattggtgcatttgacgagtgacttagctgaagcacagaccttattggcggatgattggctattacaagtcagtgcgaagcttgccgcgtgggcacaaaaagttgaacaacgtgatttagaagcatttgtgcagattcagacgcaaattttaccagtattagttgatcgccaacagcagaagacctttttaactttggtgggcttatggtatcaagatttattgaattaccgctatgaattaggcgtcacaccttgttttggtgcgtacgaaagccagttaaatcaggccagcgccgcgttgactaccacgcagttggtcgctcagacggaatatgctttacaagcacaacgcatttttgaacaaaatattagttgccaaaacgtcttagagagtttaacgttaaagttaattgcatagtaaaacgcataaccagcgtatcgggaggatatcaacggtgagtaaagacttatatgaacagttatcagacattgaacagcaagctaaattgacgtttgaggggctcagtgaaatgaaagcagtccttgccgaagtccttgagaaaaacgctgaattaaagattgaaaacaagcacttgcgggaacatttgcaagaattggaaccatcagccaccccgcaaacgggtaaggaagggtctcaagccctttcgaaatcaaaacaaaacttacagaatctttacgaagaaggcttccatatctgcccgtacttttatgggtcacgacgcgaaaataacgagccttgcgcattttgtaatgatgtcatctacggcgaacgaacaaatgattaaaaaaggcagggcaaaagggatgcttacttttggcctgtctttatgtcattattgatggatcttgaaaggatagaacatgcaaacacaatcaagttttaaaacgacggaaatgggaactttatttttagtaccaacccccatcggtaacttaggcgatatgacctaccgggcaatcgatacattgaaatcggtcgcactgattgctgctgaagatacacggaatacgcagaagttattgaaccactttgagattgaaacgaaacaaattagtttccacgaacacaatacgcaacaacggattgaaacgctgattgaaaaattagaagccggtgacgatattgcgcaagttagtgatgcggggatgccatcgattagtgatcccggtcatgagctcgttaaagcttgtattgaagcgggcatttcagtggtgccattacctggagccaatgccgggattacagcgttgattgcttcgggcatcacaccacaaccgtttacgttctacggttttttgcctcgtaaaggcaaggagttaacggaagccgtaacgacgttggcacaaaagcctgaagcacttatcttctatgaagcaccgcatcgtttgaaaaagacgttgcaagctttgctcagtacgtttggcgccgaccgcaaagtcaccttggggcgcgaactcacgaagaagttcgaagaattcattcgtggcgacctagaagaagtgcttgcttgggcgactgaaacagaattacgtggtgaatttgtgatgatagttgctggaaatccagcaccagatgcaacggtcagtgcagttgcaacggaatcgctatcccttcctgaacaagtggaagcccagattcaacaaggagccagccccaacgtggcgattaagacggtcgctaaagcaaatggcttgaaaaagcaagtcgtttataatgcctaccacgaattaacagaatagaggtcacgccatgccaggaaagcaatattcagaaaactatcaaattccgtatttcgaaacggatatcaagggcgaattaacgcttgcatccttggtgaacattttaattttagcatcagagcatcaactcaatgcgctcaacgtcggtgaagcgacaatgcatgcgctcaatcttggttgggtggtcacgcagtatcaaatgaagattacgcggatgccgaaggtggatgaaaaagttaaaattgtgactgaagctgagagttacaacaagtatttctgttaccggaatttctggttatatgatgaagccggcaacgaatgcgtcttcgtccaaagcatcttcgtgatgatgtcgtatgaaacacggagtatggtgcaagttgtgccggaaatcatggcaccattcgagtcaagtgagattaaaggtagcaaacgattcccacggattaagaagattgatcccgaacaagtgacgaccaaagaatatcgtgtgcgttatttcgatattgatggtaatcaacacgttaataacgtccattattttgaatggatgttggatgcgctcgattatgacttcttgacgacgcaccgcgtagcaagtatcaacatccgctacggccacgaaattcaatacggtcaaatgacccaaagcatggtcgaacaactcatagttgatgatataatcacaacacggcataaagtcgccgtggatgacctaagtgcagcagaagcagagattacgtggaaagagtgctgagtcgaacgggttggctttgaggattaacgggataattgggattatggcgggtcttagccataatcccaattattcagttaaccggaaaaggcagttcgaggaagcgcgtttaaacgaaagaaagccccattcacagataaagttgtgatggggctttcttttgttatcttcgaatatttattgaaacgtgctttttgaaacagctccctgcgcttaacccaagttaccaaatcggcgatttcatcgccaattcggcaaatccagttaatgctcagaagctaaccgtttcaaacgcactctatcgaaaacgtgttttcatcaacagcttcctgcgctttgctacacttatcaaatcggcgcttacagcgtcaattcgctaagttaggcaagtgctcagaagctaaccgttgatgacgcactctatgatgttgcgttgctgacaaattcttttaatgctgcgcctgttttgcctgcgctgaggccgacttgtagtttgaggcgtgcttttggtccattgaggccttggcagaaggtgacgcccatttgtttaagctttacaccgccgccttggtaatcgtagacgtcttcggcaatcccgttgaaacagcgagaaacaagtacgatggggatgttgcgatctaatagcgcttgaacagcgggtaaggttgctggtggtaagttaccagccccgagtgcttcgataacgagccctttggtgttgggttggttgatggcgtcgaataaagtcccatccatgccagcgtatgcttttaaaagataaacaggttcgacaagggttttgatgtcgcaaatttcagaacgaattaattcttggaagaaattcgcattgtgtttgctgaccaaaccgatgggaccaaaagttggcgttctaaaggttgcgacgttcgtcgtgtgcgtcttcgtgacataccgtgctgtgtgaatctcatcgttcatcacgactagcacacctttatcatgagcatcgtcagaagcggctgtccaaacggcactaatcaagttgtgtaatccgtctgcgccgatttcattcgacgagcgcatcgcaccagtcacgacgacggggatattgttgggaagtgtcaagtctaagaaataggcggtctcttcgagggtatccgtcccgtgtgtgacaacaacaccatcaatcccgtcttcttcagcttgttgaattcgattcttaaggtttaacatcacagcgggtgtgatgtgtggtgaaggcagattggcgaactcttcactttcaatgattaattgattatcgaacagcttttcaaagccggccattggattttgatctgtgggtgcaaccgcgccatcttcgtccgcagacattgcgattgtgccaccagtatggaggactaaaattttcttcatgtttaatgaacacctttctttaaatccgaattactcatctgtaagtatagcaaattttctgcaagagttgctgaaaaatgaaaatcaattgcttgtaattaaataacgttagtgatacatttaaggggttctaaaaattcggagtaggactgaagcgttaagtgctggtggaacggaatgtggacaccagacgaaaagcagcaatgcttgcgatttcagtaccgcattcgccgcagtattatttgtggcagctccaaaagggagatgctttttatggttaatggtcagatttttggtgttaagctagacactagacgcgttgttttactagctgttttaattgctttacaattggtggttgcacgctttgcaatttcactaacgattttcagaattagttttggattcatcgtcaccgccttaatggggtggtggtttggcccagtttgggcgggacttgccgccgttattggcgacctcatcaatagtttgatgattggggtcccaggtggttatttcccaggcttcacactttcagcgtttctaggggctttcatctatgggtgttacttctaccgacaaaagattacatggtggcgcgtgattgccgccgttgtgacagttgtgctgatcgttaacctcggtttgaattcatggtgggtgtcgattattagtcatacaccatttgggttccactttacggcgcgggccattggggaagctgccacattagtgattcatccgattattctatacatcgtgatgcatttcgaaccgattattagattaaaagatagagtattataaatgagtaggtgttatctatttgaagataacgcctttttttgtggaaaccggctttttatgctagaataacaaggattataagcagaagaaggatgaaataatgaagctattggcaatggatacctcgaatcaagcggtgagtgtggcactccttgaagatcatcaaattttaggcgaaatgactgttaatattcgtcaaacacatagtcagacgttacttccaatgattgatcaactattaaaacaaacaaaaaccaccattgaagatatcgatcgctttgtcgttgcagaaggtccgggttcatacacgggattgcggattgcggtgacaacggctaagtcttttgcttggacgcttaataagtcattggtcgggatttcgagtttagcattgctagcggccaatgtgatggatacgaccgccttgattgtaccgctgtttgatgcacgccgcgacaatgttttcgcggggatttatcagtggcaaaatgggacattgcaaaccgttgtggccgatcaacacgtttcactagaagcactactggcacaattacaattattggcagaacctgtttattttgtggggaatgacgttgcacactttaacgaacagattcaagctgcattaggtagtaacgcgcatttcgtgtccgccaaccataatttaccgcacgccagcgtcttgggtgaattaggcttgatggctgaacctgtcgcggatatccatggcttcggacccgtttatttacgcaagacggaagcagaagttaactgggcaaaaacgcatgatgagcgaggcgctgattcgtatgtggaacaagtttagggaatacctcaaaccccagatttgggtcaagaaagaaatgccttacacaactcggcgcgttgaaattgatgagacgacattttacttagcacgcgcgagtcaaaatgatattacggcattgttggacattgaacggtcggtctatgccggtcagacgccgtgggatcgttggaccttcactagtgagttgagcaagcgcaagacatcgttgtatctggttttatgccaagggactgaagtcgtagcgtttgtcggtgcatggttttcaaccaatgaagctcatattacgaatatcgcggtgcggccaagttatcaaaaacgtggtattggccactttttggtgcacgaaatggttagtttagcccacgattatcccagtcaaaaaattacactagaagtacgcgccagcaacacaagcgctcaagccgtttatcagcgattgggttttacagtggtgcggacgcgtcccaattattacattcaggaaaaagaagatgcattcagtatgtgtcggatattgagtcaataggagtcagtcatgtcggaaaaacgagaattaattttagcatttgaatccagttgtgatgaaacgagtgtggccgtcatcgaagacggtcatgttattttaagcaacatcattgctacccaaattaagagtcatcaacgttttggtggggtggtacccgaagtggccagtcgccatcacgttgaacaaatcacagtttgtacacaagcggctttagaagaggccggggttacttacgctgatttaacggcggtcgcagtcacttatgggcctggattagtcggcgccttattaattggcgtgacagctgccaaagcgattgcttacgcacaccacttaccattgattccagtcaatcatatggcggggcatatttatgcggcgcggtttgttaagcctttagaatacccattgttagctttactggtttcaggtggccatactgaattggtgtacatgccagccgccggcgaattcgaaattatcggtgatacacgggatgacgcagcaggtgaagcctacgataaaattggtcgcgtcctcgggattcaatacccagccggtaaagaaatcgatcggcttgcccacttaggtcaagatacatttaaattcccgcgtgcgatgctcaaggaagataatcttgacttcagctttagtggtttgaagagtgccttcattaacacagtgcaccatgccgatcaaatcggtgagacgctgaaccacgaagacttagccgctagtttccaagcgagtgtggtcgaagtgctcaccactaaaacgatgcacgccgcgcgtcaattaaacgtgcgccaactcgttgtggccggtggggtggctgccaatcaaggtttacgtgaaggtttggcgacagccattaaggcatccggaatggatttagacctcatcatgccaccacttcgattatgcggcgataacggcgccatgatcggggccgcagcgcatatcgaattacaaaaacaacaatttgctgatctaagtttaaatgcagtccctggtttggattttccatacggtgcataaaatacgaattcaaaaagcctgtcgataatttcgacaggcttttttgcttaaatggattgcttagttgattgtaaggtagtatagatgtccgtcggcagtgccactatcaacggactgagctgatccacgccaatcagtgttaaatcgtgcatagcacgtgtgacgagtgtgtagaggagatctacgtctgattgtgcgccgaaggtcttcttagagatgtcgtagccaatcacagcgtcgaactcgagccctttggctaaatataatggaaggattaggatgcctttgggtaaactacgggttgtttcaccgatgagtgtgacgtgttcatcaggtgttaaactagcgtagagttggtgggcaacttgttggttcttggtgaggatcgcaacggtcgcgtgttctgcctggagatggcggatttcttgggtcagtgtagcgagcgcttggtcgtttggcgtctcaatgacgcgcggtaggcgcccgtcacggctgaaggcttggagggctgtttcttttggcaagagtgccttggcgaagttggtgattggggcggtcgcgcggtaactcttggttaagctaatttggttgatttttaagcggggaaaagcagcggtcagttgatcgatgaagtggccggtttggtaggtcgccgtgaagacatcctgtgcgtaatcgccgagcacggttaatttcgcgttgggaaaggcgtggtggatgtagacgaactgagcgatgctgtaatcctgcatttcatcgatgaagaggtactgaatgccgtgattttggccgctgtcagttaataagtcgcgcaggtatagaattggggcggcgtcactgagcccgacgatgtggcgttcattgttatccgcgacttggcgaatcatggcgtcccaaaccttcgtagggatgtcggcagggcaagcaccacttaagaagtgttgatattctgtggattcatctaggaaataatcattgtagattgattcatagagtggggcgaaataactttgaacgatttcacgagcgatgaaagcttgttcatcatcgccagaatcgaattcgcggtcaccgacaatcgtccggtaagcatcatcggttaaggtatcgattttttcagcgacccagtcgagatgaacttcgaggttgatttggcgtttaagccgtttgatgagcgtgtttttagtggcgaggaatttgtcgccgggtaacatatttgcggggagcgcgagataaatctgattcatctggtctttagtaaaaaatgggcggtcttcgaagtatagatcgttgaatgccaacggttgggttgaggcttgtttaacgtaagcttcaattgcgtgcatgaacgctgcgctttctttataccggcgcatggcttgtgtcatttcaggaaaactggcttgatctttttcgaagcggtcgaagaggttctcaacctgtaagcctgagaagcgatgacttaagaactcggccatcgtcacttggcgcatgtttttctcgcctaaactaggcaggacttctgaaatataatggctgaataaacggttgggtgagaagagcaccatttggtcggcttcgagctgactgcggctgtgatagagtaaaaaggcgatgcgttgcaagacagctgaggttttaccactaccggcgaccccttggacaatcagtaagtcagcggttgtatcgcgaatgatatcattttgttctttttgaatcgtggcaacgatgttttgcatgtattcgtcactttgttcaccgaggacggcttgtaagagttcatcgccgacagtttcgttcgtatcaaagacgtgttcgatttgaccgttttgaatcttgaattggcgtttgagtttgaggtcaactttgacagggccatttggcgtctcataagtcactggaccgagtgtcccattatagtagatactcgaaacaggggcgcgccagtcgtagattaagaaattgtcttggtcgtcgataaaagtggcggtcccgatgtagagtgattccgtttcaccatcttcggtgatgtcaatccgaccgaagtaaggggagttgacgagatcggtcaggcgttcttgttggctagtcagtaatttttcgttttcgacagcggcggcgaccaattgcttttgttgttggaccgcggcgttggtttccatgcggtcatcgacttcggtaatgttgactttcgtattgtcgccgtaacgttgttcgatgtctttggtttcattgtaggcgttggccaattgttggttaatcactgtgaggcgttggtcgacctgtataactgtgcggtcaacgcgcgcttgttcttgttgttttgtgtcttcgtgtaacatagcagcctccaattgttagttgttatattataagcgtcttggggtaaaaaagcgaccgattgacattcattttaaaatccgttagtatgacagtaattcaacagacaaagtgaaggataagtagcaactgatattttcttgaacaggaagcggcgggactgagaagtcgtcaaggagttggttgtgaattgggccttcaatcgggaattagtgagtaactaattcgggtagcacccttatcgcgtgagtggcacggatgattttcgtgcaatttaggtggtaccacgtagaggcgtcctaattgtttaatcacaattaggacgctttttttgagttgataaatcaaattggagggtattattatgaacaaaaaaattatcttaaccggcgatcgaccaaccggtaaattacacattgggcattacattggttcattacgcaaccgggtagcgatgcaagattcaggcgaatacgaaacatttatcatgattgccgatcaacaagctttaaccgataatgcgcgtgatcctgaaaaaatccggaacagtctcttccaagtggctttggattatttatcagttgggattgatcccgctaaaacaaccgtcttcgtgcaatcacaaattcctgctttgagtgaattaacgatgcattatttgaaccttgtgacggtttcgcgtttacaacgcaatccaaccgttaaagctgaaatccaacaaaagaattttgaacaaagtattccagcgggctttttaatttatccagtcagccaagctgctgatatcacggcgttcaaagcaacgacagttcctgttggtgatgatcaagaaccaatgttggaacaaacccgtgaaatcgtacggacgtttaacaacgtttacggacaagaaattttagctgaaccagaaggggtcttcccaccaaaaggcgaaggacgcctacctggtttagatgggaacgccaagatgagtaagtcattaggcaatgcgatttacctatcagacgatgcccaaacgcttgaaaagaaagtgatgtcaatgtacactgatccattgcatatcaaagtaaccgatcctggtcacattgaaggcaacacagtctttacctatttagatgccttcgatgatgatcgtgaaaaagtggctgaactcaaagcgcaatatcaagctggtggtttgggtgatgtgaagatcaaacgttacttgaacgaagtcttacaagcgaagttcgcacccattcgtgaacgtcgtgctgaatttgaaaagaatccagaagccgtttataagatgttagaagaaggtagcaagaaggccaatgctgttgcagaacaaacccttaaagaagtgcgggatgcaatggggattaattactttaactaatcctattcaaattaaaaaaacagttaaacaagtcgctgaatgacttgtttaactgtttttttatagactaatatagtgggataatagatgctttttgatggtactttaaagttgaatatgagagacttaactcaatttaagacagatgtaaacgctgtttttggtgtataatttgagaagttatcaacatggagcaaaggagaattgatatgcatgatttaactaaaggtaatccgttgaaattaattatcttatttaccggcccattattgattgggaatatttttcagcaactctatagtgtcatcgataccttaatcgttgggcggacaattggtgttaatgcgttagcagcagttggctcaacgggtggattgaacatgctgattatcggtttttgtacagggaccacggctgggttgtccatcttgacagcccaacgctatggtgctcaagactatcgcggcgttaagcgcagctttgcgacgagcattctgattagtttggtgataaccatcattttgacagttattagtctattatttgctcgacatattttggtcatgatgaagacgccggccagcatcattgttgatgctcaacggtttattatgattatctttggtgggatttttgcctcgatggcgtttaacttactttcgaatatcattcgcgcacttggggatagtcgaacccccctctttttcttagtaattggggtcattgtgaatattgtgttagattttatttttattttaggctttcatatgggcgttgaaggggccgggtttgcgacggtctctgcacaaataattgcggctgtgttatgcttactatatatttatcgccgcattccggtcctcgttttacggccgaaggattttcgcgtgacgcgcaaagatgtcatggatcatctcaaggttggattgccgatgggctttcaatcgtcaattattgcaattggctcaatcgtgatccaaatcatgttgaatacattgggtgctagcgcggttgctgcttacacagcggctgggaagattgatcaattagcaactcaagttgggaattcatttgggattaccttggcgacatattccgcacaaaattacggtgcacgtgaatttggacgaatcagtaaaggggtccgccagacactaatggtgtcaatcatctttagtttagtgatgggcgcgttgatcattgcctttggacgaccactggttaacctgtttatcgggaacaatcaaccgtacgtgacggatttagcacaaatctacttccgctttaacagtagttgttactttattttggcaatcttatttgccattcgctacaccttgcaaggtttggggcagagctttattccaaccttagcggggattgcggagttgttcatgcggatttttgccgggatcttcctcgtgcagcaattcggcttcatgggcgcaagtttagccaacccactcgcttggattggttcatgtttggtgctattgagttcctatttcaagacaatgcaccaactgaagcgtcgtgaagcaggtaagaatagggaggaacaggatgtttaaaaagtatttattggtcggcttatcgttgaccatgttggcgttgggtggctgtcaggcgacacaatctagtcaaccaacgcacgagaatgcaccaacaattgcaaataaaaaacaagttaaaaaaacaacggcaatcttggctgagaagacctttaagtcaggcgacaatgcctatttagaagtgaaccataataaatcaacgttggatgtccgtcaatggcaaaccgaacggatcaagtatggtgcgttggatggtttaaatcggacaacgactaatacggctttcttatcgaaagagacgttaggccgttcaaacacacgccatcgtcaaacgtggcaaccaaccggctggcataatcaacccgtgatgattgatggccaacgggtctttcctgaaagtcgcggccatttgattgcatacgcgatttcgtttaatttcaaccgagatggtgttttccaaaaaggggaactcggcagtagcaataatccgaagaacttagcgacacaaacggtcttcagcaatcaacgtaccatgcagatttttgaagaccaggttcgccaagcactaacgcaaaataaaaaggtgatttaccaagtgacaactgtgttccgtggagatgaattgatgccccgcggttactgggttcaagcaatctcaacagataagaagttgaactttaatgcgtatgtttggaatgtacaacctaagatgcaatttgactatgcaaccggtcgcggccattacgatggatcgatggcggtggtggatcagtatgcaggcaatccttatcagaattaagtagaaccaaaaaaagcgccgtctcaagattaattgagacggcgctttttttgcttaatgcacaattactacttacttagaaactaaccgttttaaacgtactttaaacatgcttcgatagccataaccttccggttcactacacaacaaaaatcatggccggaaaccaccataattcctggtgataggctaatcttcaagtgataaacggctatctcagcactttatggcaggtcattgcctgctgccaagtataggtcgtaccattctcttctggtgagggtgactttgcctgcttcgcagatttgtgctaggcggccggggttcattgtgccgacaacgacttgcatgctggctggaattctgaggagccatgcgctagcaattgcgttgacgttggtgtcatgtgccttggcaactgattggagtgctgcgtttaattctggaaatttcggattatcgatgaagaccccttcaaacatgccgtattgataaggactccatgcttgaatggtcatattcgtgaggcgtgagtattctaataaaccaccatcgtgatgaatgctgcgcgcgtcttgcatattggtatgcacgccggcatcaatcataccagtgtgcatcaaactgaattggagttgattagcaatcaatgcttgcggcactgcttgttggagtaagtcgacttgaccgggattgaagttgctgaccccgaattggcggactttaccactattttgcaattttaagaaggcttcagcgatttcatccggttccatgagtggatcaggtcggtggagcagtaaggtgtcaacatgatcaagttgtaatcggttgaggctggcttcaacaccttcgatgatgtgttcctttgaaaagtcgtacatttttttgccaatgccgactttggtttgaacgagcacttgatcacggtcaatatgactggccttaagggcgttcccgaatttaatttcggaagcaccatcgccgtaaatatcagcgttatcaaagtaattaatcccatgttcataggcggtttcgagcattgtcagggcttcttggtcgctcagttgtgggatgcgcatgacaccccagacaattggcgaagccattaagccgctgccaccaacattgattttttgcactatcaatcactccttttatttgatgcttttaacctaccacaaagtaccattaatgaaaagaaaaggctttcctgaatttcaggtcgtcactggcgacaattttcggtatactaatcacaatagacaggagacagttagatgacagataagaaagcacaggcaccgcggctaaatccacaacttgagacggtacagcttactgcgtttgaaccagatgagacttatgaaggtttgtttttcgaagaactaacgttgaagcaaaccgaagttgagatgttattctttaaaggctgtttatttaaaaattgtcagtttgaacaagtcgactttaataactgtgattttcaagatgtgcaattcgaacactgcgcgttgttaaactgttcgttgacgaatgctcccttccaacgagtcgcgtttaatggttgccagttgattggttccgattttgcagaggctggtctgaatgatgtcacgttcgacacttgccaagcggattacaccggctttaactttgcgcggatgcggcatgtcgactttaaagattgcagtatgcaagaagtctcactcgggcaagttgattggcagtggctaacaatgatcgggaatcgtttgaacggcatggatatgactggcacgaatttgaagaatctcgatatcagtcagaatcaattcgaaaaagcgactttcacgctcgaattattacgtggggcgaccatcagcacagaacagacgctcgtgattatgagcgcgttgcgaattaacgtccgctagcttgccggtttttaaaggcaattatcagacaactgattgttgcgatgagcatcacaagcacagcgaagaaatcttggtgcaacagctggcagaggccgctgatacataaagcgatgaataaaataagtgggattttaaggttggctttcattggtcattcccccgtactttaatctgaaaaggcagcgacaaaatattgtggctgccttttcgtttgatttttaataattaatcttgtatgtcaattcaacaaaatgaccgatttgacggctattgataagttccaatggcatatcggttaagtgcgtgctgaccagtgaaatgccgtcacccaggagaactggcgcaatggtgatgatgagttcatcgactaactgggctttaagcaattcggtaaagatttctgcaccacccacaagccagatattgccaccatcttctttttttaattgacgcatgaactcaggaatattcccagcaacgacatgtgttcgatcttctgtatcatgtaacgttttcgagaagacatagccgtttttatcttggtaaggataggtgccggctaatttaagactttgttcatatgtcttacgccccatcacaacggtatcgacggtgcgttggaaagcttgaattgcagcgtctgattcggatgaatcgagtgcagctaaccaagcagtgctaccatctttttcagcgatgaagccatctagactctgagcaaggtataaaattacttttcgcgaatttggttctgtcatagtcaacacgtcctttaaattaagattacctttattataacagttttaaccgctttcatacattctaaaccgttggtaatttaactggatttggcttatcatgaaaagcaaagctgtttactcaaaggagaccaaaaatgacaactactgaattttccccagaaatccaaagtttaattgaccaagttcaaaagaattatcctcaacccattaagatccgggtcgcagacgcagcgtctgggatgttaaaacatgatcaggcacaacgcgttttaaataacgatggcagcttggcaatcttaattaccgatgcgacagcggctgattatgctctatcacacgaattattgcacttactattattatcaatcggttttccacaaatcatgaccgatgtcaccacgcaggatgcgcaacttgatgaacaattggttgcgaccggcacaactttgtacaatgccgctgtgcacatggtgattcaaaaagaacaagaatcccatggctttgtggatgttgaaactaaacaagcctaccttgaaggtctacgagataatctgaccccggaaaaagacgatcccgaaaatagatgggtgattttccgcgtattaacgctgttagatgccctcgtcttctttgatggtggcaaccaacaactgttaaaacagtggacggctgattatccgattgcgtttgcccaagccgaaattctctatcatgtgttggcacgcaaaacaattgattcaccattcacattacggcgggctgtgattaacttgtgggttgcgtttgatcgcgtgttatcaaccctaggatttgctgaaacgaacctccaacaactcttgacattaacgccggtattaagtgaacggcaactacgattagaagtgcgccaagtctacgatattttacattccgaaaatctatttgcgaccgcaatgaaccaaaaagcgtatgttggaattggtaagagtgatcaacaaaatgcttttgtcttagggattccagaagacaaggcaacaccggaatatttcaaacgattgtatgatttatcagtgcaaaccttcttagatgaaattggaatgccgtattcattaagaaaatgagtgcgttcaagctggtcaacttttgagcattagcacagggaagcgaattagcgacgcagtcgatgatttgattcacagtgctaagcacagaaagttagcttgaaaagcacgttaaagaacagagtgcgttaattcgcggttagcttttgagcacttgcctaatcagacggataagcgccaaaggcgattggccgactgatgtagcaaagcgcagaaagctgcgaattaaaagcacgttaaaaaggagtgatggtgatgacttttaaatcaatgttgcatgcggcacagcatgttgttttcttgacgggtgcgggcgtgtcaacggcttctggcattccagattatcgatcgaaaacggggttgtatcatcagcaagccaatccagaatatttattaagtcacacgaatttaatcaccaatccagccagtttttatgaatttgtcacgcagcagatgtattttcctgaagcaaaccccaatgtcattcaccaagtgatggcgacgattgcgaatcaaaaggggcagattatcacccaaaatgttgatgggttgcacacaaaagcaggcgcgcgggatgtgattgaatttcatggtagtttataccgtgtcagctgccaaaagtgtggccaatcagtgccttatcaggcctatttaaaggatatgcatcatcaagattgtggtgggattttgcgaccaaatatcgttttatatgaagaaccgattgatccgacggtgattgaacggtcgattcaggcgattgaagcggcggatttaattgtcgtggtcgggacgtcatttcgtgtgtacccatttgcgagtttaattgaatatcgccgtccagatgcccaattagtagcgattaatcaagaggcattacaatttgaaatgccagtcactatgatacaagcggatgcgacaaccgtttttgccgcactagcaactaaggagtgagcccatgttaactgaacactatcaaaaaattgatgcaattgatgcccaattggcggttttatttgaagaacgcatgcaagtcaccaagcaaattgcaacaatcaagcatgaacaaaaaatcggcttgacggacatccaacgcgaaaaagcggtgatggatgcgcgccttgctgcggttaaagatccagcactcgcagattacgtaagggatttataccaaacgttaattttaatttcgaaacaatatcaagtaaaattgatgaaggcgatgaaagaagcagaagaaaaataatgtggaaagagcgaaacggagacggagcgctcttttttgattgaaacgtgccgattcgaactgccttttccggttaacctaaaaatggcaatcatggctgaagagcgccataatccccatttttttgttaatcctcaaagccaacccgttcgactcagacactctaaacgtgccgagtctgctatatctttccggttagctatgtatcgcaaacaatcgacttcgtcgctcattcacgatgcgctgctaatcatcaagatataaccggcagattcagcactctgatttgaaacgtgccgattcgaactgccttttccggttaacctaaaaagggaaatcatggctgaagggcgccataatccctattttttgttaatcctcaaagccaacccgtttgactcagacactctaaacgtgcttcctgtcgcagtaatttccgcttaatctaaaaatggtattaatcctaaacccctggattaataccatttttgaattaatgctcaattgctaaccgcgacagtcagcactcttttgcttaatatgctaaaatgaaactaatttatgagatgtgaggctattgaactgtgactaaacgacgctataatttagcggtaattcgctatcgcgggactttactattattgaatcggattaagcccccatttgctgggctttggaatggcattggtggtaaaacagaaactgatgagacgccaatcagtggtatgcaacgggagttatttgaagaaacgggtttacaaaccaaccaatacacactccaaaatgcggggtggattgattggcacatcgatggtgaaccgattgcaccgattgacatttttttagtcgatattttaccaacggtgcaactaccactttatccggtcggaatgcgcgaaggcgtgcttcaattatttgaaccagaatgggcacaagctgctgataatcaaggaattgtggcagacttacaggccattttaccaactgttttaagcggtcagctcaatcggtatgacacggattttcatgcagatcagatgattttctttgaagcaattcccattactgaaccaagagaaggagaggaagcactatgatgacaaaggaccaaacgatgatggtcttgatggttttaaagaagaagttgcaagggattcgtttttttagagtcgtcgaagaactgttctcgttatacattatttttaaattcttaactgcaacgggcaaggtacagcttttaggggtggcgttttctgaggggcgcgccattagcttaatgttgctgctgctagtcatcgactttagcctatcgcggattcggttaaattataaacgcatgggacaacaattaattgtcacattgaaggatttaacggaacaagaagctttgttcattcaacaattccaacggttctagaggtgtggatatgataacaattggattaactacttggtcagaacatcagtcattaatgcccagcaaaaagcagttaacattaaacgactacgcgcaatttctgccagtggtggaggtcgatagtttttattacggcttacgcgcaccaaccgtcagcgcaaactggttgacgcaagtaccagccagttttcagttcattgttaaagcacaccaagcaatgacccgccaagaagactacgccgagtttacgagtactgaaaaagaattgtttgtgcggtatcgccaatcaattgaaccgctaattaaggccggccaattacaggcggtcttatttcagtttccgccattttttcaactgaatcaggaaaatagtcaatatttacgacaaattcgcgcgtggttaccggatgtgccaattgctgtcgaattccggcatcaatcctggtacgatgacgcttttaagcaacagatgtacgcctttttgaagcagctaaacatgacacacgtcatcacagacgaagcacaaacaccgacgaacagtgtgccgtttgaaccggttgtcaccaatccggcgtttgcgatgttgcgcctgcatggtcgtaatatggccgggtggcagaatccgggtgcccaatggcggaagcaacgaacattgtatcgctatgatcaagatgaattacaattttttgcggatgctgtgcggcagattaaaaatcaagcggaacaagttgccgtgatttttaacaataattctggtggggatgctgcggataatgctttgcaattacaacaattacttgggctagaatttcctgatttagccccgaaagcgcctgaacagattgatttattttaatgaaggcttagtgtgagttgtcgtttaaatgactgctcttttgtgctatactttgattacttatatggcattatttaagcaagtcgagaattgttaagattctcgtttttttaattaaggagcgaacctaatggcagagacaaaaccaacattttacgtaacgaccccaatctattatccatctggtaaattaacgattggtaactcatatacaacaatcgccgccgatgtcatcgcgcgttataaacgcttgatgggctttgatgtcttcttcttgacggggacggacgaacacggcttgaaactcgaacaaaaagcagctgaaaagcatttagccccacaagaatatgttgatggcatggctaaagacatcaaggcattatggcaaactcttgaaatttcaaatgacaaatttattcggacaacggatgaataccatgtcaaagcggttcaaaaaatcttcgacaagttattagcgcaaggcgatatctatcttggtaaatacgaaggttggtattctgtttctgatgaagaatacttcactgaatcacaattagcagaagtttataaagacgacgatggcaatgtgatcggtgggaaagccccatctggtcatgaagttcaacgggtcgctgaagaaacttacaagtttaagatgagcaagtatgctgatcgcttattggcttattatgaagaacacccagatttcatcgaaccggcgtcacggcgtaatgaaatgatcaataacttcatcaaacctggtttggaagacttatcggtttctcgaatctcatttgactggggaattcacgtttcaagtaatccgaagcacgtggtttacgtgtggttagatgcgttatcaaactatatcacagcgcttgggtacggttcagacaacgacgaattgtttaataaatactggcctgctgatgtgcatctagttgggaaagaaatcgtacgattccatacgatttattggccaatcttcttgatggctctagacttgccattaccaaaacaaatttttggtcatggttggttgttgatgaaagacggtaaaatgtctaaatcaaaaggcaacgtagtttatcctgaaatgttagtggaacgttatggtctagatgctttacgttactatttaatgcgcgcgattccatttggtaatgatgggacatttacaccggaagactttgtcagccggattaactacgatcttgccaacgacttaggaaacttgttgaaccggaccattgcgatgattaacaagtacgacaatggcgctgtgccagcttaccaagctgacgtgacaccgtttgatgctgacttacaaaagacagccgcacaaaccatcgaacaatataccagcttaatggatcaattgaagttctctgatgccttagataccgtttggcaattaatcagccgggcgaataagtacatcgatgaaacagaaccatgggtcttggcaaaagatgacagccgcaaagcggaactcgatagtgtcttagcccacttggctgagagtttacggattgttgcgctcttattacaacctgtgatgacgcatgcaccacgtgatatgtttgcacaattagggcttgatttcgatcaagttgcgcaacgtgaattggtttatgggacattcccagccaatattcaagtggttgctaaagggaccccaatcttcccacgtttagacttggatgaagaagtcgcatatattaaggatcaaatgggtcaagcgcaaaaagcgggcttagtgaacgaaaaagtgaaggctaagcaacaagcagctgaagccaaagctgaattcgatccaaaagcaacaacattagtcagtgaaaaggacgccatcaagtttgaagatttcgatcaaaccgaaattcgcgttgctgaaattaaggcagttgccaaggttgaaggcgctgataaactattgaaattccgtctagatgctggggatcaaggtgatcgccaaatcgtttccggcattgctgaattctatccagactatgaagcgttagtcggtaagaaagtcttagccgtcacgaacttgaaaccacgtaaattgcgtggcgaattgagccaagggatgttgttatcagcagaacatgacggacaagttgaattagcagttgtgccaaacaacttggtgaacggctcacaaatcggttaatttaaaataacagaaacgtcaaaagggctaaaaggcatttacattctgtaggccttttagcctttttaatggaaaagagtgtgttgccagtggttagcttttgagcatttgtctaacttggcgaattggcgatggaatcgccggtttgaaagtgtaacaaagcacagaaagctactggcaagagcacgttttaactgtcagaatgaggacactaaaaggagattgaaatgcaaatttttgattcacatacgcatttgaatgataccccatatgcagggcaagaagctgattttatcgcgcaagccgctgaactcggtgttgttgaaatggcgattgttggttcagatacagtattaaatgagggcgctttgcgcttagcagcgcaatatgaacctttatcagccattatcggttggcaccctgaatcagccaaagattatcacaaggcagaagaaaccgtgctgattgaccaattacaacgaccagaagtagtggcgctaggtgaaattggtttggattatcattgggatacttcgccacgcgatgtgcaacaaaccgtttttgcacggcaaatcgagattgctaaatccttgcatatgccaatttcagtgcacacgcgggacgcgttagaagatacgtacaagattctaaaagaaacagatgtccgtgattgtggggggattatccacagttttaatggcgatgttgaatggatgaaacggtttatggatcttggtatgcagatttcgttcagcggtgtggtcagttttaaaaatgcgcatgaagtccatgaagcagctaaagcatgtccattggacgtgatgttggttgaaacggacgcaccttatttaacgccgacgccttatcgtggtaagcagaatcaaccaggctacacacggtatgtggtagaagcgattgctaaactcagagatgtggcaccagaagaaattgcggcagcgacgtatgcgaatgcccaccggatttttaagttaggagcactatgaaaaaaacaattcaagaagtgattgttgttgaagggcgcgacgatacgaagcggttacgggaagttttcccagatgtttcgacaatcgaaacgcgcggttcagcaatcaatgaagaaattatcgaaaaaattgcgctcgctcaagaaaaacgcggggtcattgtctttaccgatcccgattttcatggcgagaagattcgtaaaatcatctctcaaaatgtaccgggcgtcgaacacgcctttttaccacggacagaagcacgtccggaaaaagcaggcggcagtttaggcattgaacacgcaaaaccagcggcgattgtccaagcacttgagcatctattaacacaagatgaagaagcagacgaacaaatcagtcaatcggatttattaacggcgggcttgattgcgggggctgattcaaagcgacggcgcgaattactcggcgaaattttgcacattggttacaccaacagcaaacaactttacaagcgtctcaagatgttccaagtgacgcaagctgaatttggcgctgcactattacaaattaaacaggaattaggagattaatatggaagatattgcaaatcccgagcgtacccggaaaattctcaaacgttacggctttaagtttaaaaagagcttaggccaaaacttcttaaccaacatcgccattttgaaacaaattgttgaagctggtgatatcaccaaagatgacgatgtgattgaaatcggccccgggatcggttctttaacggaacaaattgccagaaaagcgcatcaagtattaagttttgaaattgatgaacggttaatgccggtcttaaaagatactttgaatcactaccataacgtcacgattttaaaccaagatattcttgaagcggatttaaaaacgattatcgccgaacaatttaatggtaagcataatctcaaaatcgttgcgaacttaccctactacatcacaacgccgattatgttgcacttactagaagcaggcttgccaattgatcgcatggtcttaatgatgcaaaaggaagtggcagaacgaatcaacgctgaaccaggttcaaaggcttacggctcattaagtatcgccgttcaacttcattcagaagtgaacttagcctttattgtgcccaagacagcctttatgccacaaccgaatgttgattcagcgattgttgaattagtggggcgcaaagcaccacttgtaacggttgataatcaaaccttatttgatcaattggttcgtggcgcatttgcacaacgccgaaagacattatggaataacttgcaaaatcaatttggtaaacaagatgaagtcaaagcagctttaacaacagccttagaagcagtcgagattgcaccgagcgctcgtgctgaacaattgagtatccaacaatttgcccaattaagcgatgcgctgaataatcagccaatttttgctaaaaaagctaagtaagtaattgccaaatcgttggtacaatggtataattgcaaatttttcgtttatatggtatactatccctcgaagaggtgaagcataatgccaaccacacttgccaatattaagaacggtctcgatgggcatatcggagacaagttaatggttgtcgctcaagctgggcgcaaaaaagttacaaagcgaaagggaattcttaaagaaacctttccagcagtatttgtagtcgatttagatcaggatgaaaatgcttttgaacgtgtttcatacagctatgctgatttgttaacgaaatcgattgagattgagtttgatgaagaaccaattgtcctatagtttaaaatagaagaatagagtagcactcaaccaactggttgagtgctttttttgttcaaaaagcagattgacgaatcgccatatacttcacgtggttgattagttgttgacattcgtttgataaaacaatatcatatagaatgtttatgacgtatataaaagggagaaagaatatgtttggcaattggaaagagaacaaagtgaagttaggtgggttcattattatggtctgcttaattccgattttactattactaatcacatttaattttattaagtacgaacagaccactaatattaaacatatgaaagtcgcggttgtgaatcaagatcaatccgcaacatttaaaggggaaaaggtggcagttgggcaacaggtactaaaaacgttgcgtaatgatcaccaggttgattggcaatttgtcagtgctaaggatgcaaaagcgaacttagctagcggccgatacgcgatgcaggttgtcttaccgaaagacttttctaaaaatgcgacaaccgcgttagataagtcacctaaagtcagcttgttaaaagttgaaacgtctaagaaaaataactacatggccggcatgattacaacccaagtcgtgaaccaaatgaagggcagtgtcgttcaaaaaattcaagaagcttataatcaagccttgcttggtgcaatcggcacgctaggcagtggcgtacaagaagctagcaatggcgttaaaaagttaaacacagcagccggtcaattatcaaatgggagccaacaaatctatgataatttaaatgtgttgcatagtgggacacaacaattggcagatggtagtgcgccattggcaagtggcgtgcaacaattaacaactggtgctgggcaactttcggctgggcttggagattatacagctggcgccggtcaaattaatgccggtttaaaccaactagcagccaataaccaaacaattttagctggtggccaacaaatcagtggcggtgtcgaccaattagctgatggcactaagcagttgagtgcaaaactaactgaagcagccgatggaattgaatccagtttagatggtaatcaagaccaattaacacaattgaaagctggtttaggcgctttaaatgctggtattcaagagttagatcaaaaagtgaatcattccaataatgataattccgaaattatcaaagcagacttattaaagattgcggataatacaaaaaatacaggggcacttttacaggatagtggtgcgaatttaagtcagattaacgataaagtgtacaatactgctaaacctgatagtgttgcaaacagtttacaagatgcaggaaatcaactaaaagccttacaagatttagcggtaactaacggtaagtttgcaaagtttttaattcagaatccaactattttgaaagcgttgctggatattggagatgcagcaaaagcagacttgctgaatgctggcagtcagttagagtcttctggcacgaacatgaaggctattcaagccaacttaggcacgatgggcagcaacatgagtgatactggtgttcaactacaggctgtttcagatgaattaacaaaaacggctgataacatggcacaactaaaagccggaatcgcgaagatggcaagccaagaccaagcgccgttagcactaaatggtgctactcaggcgattgatacactgacagcggggttagccaaagtcgacactgggttgaaacaaaaaggaaatacgacctatacaatgggcggaattcaagctgctgacatgattcatgccggcttggttcagattcaagatggtctaaaagggaaagctggtcaacttggtttaatgtcaggcttaacgacttatctgaatggtgtttcgactgcagctgcggggagcaatcaattagtcgcgaataacaacaagcttaatgccggcggacaacagctaacaaatggtctacaagaattaaaccaaaaagcaccaacgcttgtttctggcattacacaaattaacgagggttcaggcttattggcagatggtgctggacaattaacgactggcttaggccaagcgggtgctgggattagcttattaaacgtcaagttaatcgatggtagcaagcaagttgccaatctttcaacaggttccgcaaatgtagaacatttcgtgcaaccagtcaaagatcaattactatcagatacaaatcatggcgcattaattaataccttctcgccattagtcttaacacttgtcttctttgttggggcaatgttgacgcaattaacactttatcgctatggtgaaacattggcacatagcggtcttaagcaacggatgttggttgtagctggcgtagttgtcgcacaagccttattaattgatatctttgcaaacctttttggattgacgattgcacaaccgttcgcattcttcgtcttaagtatgatgacgagtgcggtctttacccttgcatgtttagcattggataaactttttggaacgatgggaattttaatggccttcgggttattgttcttacaactcatcattacagggggactcttcccgaatgacatgctttcaggcttctatcgtggtgtggcaatcttcttgccagggacttacacgattagtgggttcgaacaagttgtcaacggcaatggttcacaactttggttagtcttaatcgtcttggtgatcttttgtgcagtgttcttcgccggtttgttcggcggagagttaaaacaaaagttaacgcaaacaccaaatagtcaagcttaaagatttgtggtacagttaagaaaataaataaaaaggtgggaaatattgtgaaagatagtcaattgttggatgaatacgttgaactttacatgtcggcgattaaatatgtcgaagacttggtttctgaaccaacgcaagcttaccaattgtcttttgaacaatatctgattatgaaagagattgctgatgataattcagtgagtctaattgatattgctaaaaaacgaggcgtaacacgcggtgcaatttctcgacagattcgtgttttacttaaattagactatattacacaagaaattgatcccgatgatcggcgccggttgattttaaatttaacgccgtctggtcaaaaaacagttgaagaattaaatccgaagatccataatcggtttgcctcgtggatggagacgtttggtaaggaaaatgccaagcagatgcttgatttaatgaatgaatttagacataagattatggtaaaagataatcaataatatcgactgaagagcactgacagatgattgtcagtgcttttttagatgcattgttaaaaggttggtttttacaagcagatatgagtataatgaaacaattaaatgctaggtaaaaggtgaatgtgatgcaacgaattgaaaaagcacctgctaaaatcaatctcagtttagatgcactctttctacatgacgatggggaacccgagtggcagatggtgatgacgtcgattgatttggcagactatgttcagataacattacgcgatgatcccgcaattgaggtccgcacatcaagtggctttttgccagaagaccagcgtaacctggcctacaaagcagctcaattattacaacacacctatcagattccaaccggtgctttaattgaaattgataagcatattccagttgcggctggcttaggcggcggaagttctgatgcagccgctgttttacgggggttaaacgaactatggcaacttggtttaacgcgcgaacaattggcgcgattagggctacaaattgattcggatgtgccatattgcgtatatggagaaaccgcccttgtcactggcaaaggcgatcagatcaaaccactcggatcattaccgaatttttgggtcgttgtcgtgaaaccggaagtcagtgtttcgacgccgcggattattcgtgcattggattgcgaccagattcaacagcatccacaaactgaggcgctggttgcagccgtcgaagctggagatttaaatgcaatgactcgcaatatggggaatgttttagcaccgattacgactgaacgttatccagttatcaagcaattaagtgagcggttattgcagtttggtgcggatgttgctcagatgagtggtagtggtccaacggtatttggtatctgtagtcagtattcacgggctcaacggatttataatagtatgtccggattttgcgctgaggtatatctggttaaaccattgaaaccataataaaacgccgacaatcaaatggttgaggcgtttttaattggcgtaggaatcgctttaatgggataaaagcgaacaattaagctctttttttaaaaaagactaggatttaaccgaagatttctatataattgattggtagacagtttttttcggaaataacagtaaagtaatatatagaggggtattcaacatgaaagttagaagaagcgatcgattaatcgatatgacacgctatttattagaaagaccacatacgttgattccattgacattcttttcaaaccgttacgaatcagctaagtcatcaatcagtgaagatttatcaattgtgaagcggaccttttttaatcgtggcacagggatcttagaaacggttccgggcgctgctggtggtgtgcgctacatgccaatgattaaacaagatgaagcagaagcttttatcgctgagatggcacaacggctttcagaaaatgatcgcttattacctggtggttacgtctatttatcagacttacttggacgtccagaagtattacggcaagttgggcgtttaatcgccaaccaatatgtgggtaaagaagtgacggctgttatgaccgttgcaacaaagggaattccaatcgcacagagcgttgcgatgtacttaaatgtgccatttgtaattgtgcgccgtgattcaaaaattactgaaggttcaacggtcagtgtgaactatgtttctggttcatcagctcgcatcgaaaagatggaactttcaaagcgcagcttacctgaaaattccaaagtcttaattgtcgatgatttcatgaaaggcggcggcaccgtcaatgggatgaagagcttgattgaagagtttgattctgaaatggttggcatttctgtctttgctgaatcagatttcgaaggcaatcggatggttgatgattacacatcaatcttgaaggttgataaagttgatattgaaaataaaacgttaagtgtcagttatggtaattacttaacaaagaatgcagatcgcttagcttaaacgatttgatagcacccggacaggttaattgtgcgggtgctttttttatttgaagtgctttcggacagtttccaagctttgtccgttgcataaatgacagcggtaacatagactgaagttatatttaagaggaggttactatgaaaaaaataatgaatgatccaagccaaattgtaacggagatggtccaaggtttagtgcggagttatccagaccaactcaaacaaattccaggaacagaagcagtgatgaaaatcgccgatttaaaacatcggccacaagtcgggattgtcagtgggggcggtagtggtcatgaaccaacgcacgctggttttgtcggcgatggcatgttgacggccgctgtgtgcggacaagtctttacatcaccaacacctgatcaaatttatgaagcaattaaagcagctgacgcgggccgtggtgtgttcttagtcattaagaattattcaggcgatgtgatgaattttgaaatggcgaaggatatggcggctatggatgatattgacgttcgctcaatcgttgttgatgacgacattgctgttgaaaatagtacgtatacgcaaggacgccgtggtgttgcggggacaatcttcgtccacaagattctgggtgcttatgcccgtcaaggtgctggtatcgaagcaattgaagaattagcgcaccaaattacaccgaatattaagacaatcggggtcgccttatctggcgcaaccgttcctgaggtcggaaaaccggggtttgaattagcgcctgatgagattgaatatggtgtagggattcacggtgaaccaggttatcgccgtgaaaaattacaagattcgaaacacctagcaactgaattagtcggcaagttaaaagaagcccaccacatgacggccggcgaacattttgcggtaatggtaaatggcttaggtgcaacaccactgatggaacaatacgtctttatgaatgatgtcttggacctcttggccgctgaaaatgttgaagtcgacttcacaaaagtcggcaattatatgacctctttagatatggccggtgtgtcattaacaattatgaaattaattgaacctggttgggttgctaaattagatgaaccagtcacaacgattggttggtaaaggagagataccatgttaacagttgaaaatacattgaaatggcttgaattgtttgatgcaaaaatccaagctgaaaaagattatctaagtgaacttgatacaccgattggtgatggtgatcacggtaataacatgtcgcggggcttgttagctgtgcatgacgcattgaccaagcaacagccaaccgatgtacaaggtattttgaaaacgactgcgatgatgctcatcagcaaagttggtggggcttctggtccactctatgggacagcctttttagaaatggcaaaactaagcagtacgacacttgaagtcggcccattgttggcagccggtttagaaggaattcaaaaacgcggacatgcacaagttggtgaaaagacgttgattgacgtttgggctcccgttgtcaaagcggttgaagatggtactttagatgtggctgcaattgaagctgccgtcgaatcgaccaaagatatgcaagcaaccaaaggtcgggcatcttatgtcggtgaacgctcaatcggacatgttgatccaggggcggcttctagtgggtatttatttactacaatgttaatggcgggggtattatcatgagtgaatatggtgttgtgattgtttctcacgtaccagaaattgcggccggtgtagcgcgtttaattaaagaagttgccgctgatgtttcagtaacgactgctggtggcacggacgaaggtggtattgggactagcgcaatgaagattcaaagtgcttttgaagccaatgccgggcaagaattgttagccttctacgacttagggagcgctaagatgaacctcgaattggcccaagaactaacggataaaacggtgcatctatacgatgttgctttaatcgaaggttgctatacggcagcggcattgttgcaagcagggacggatttagctgcaattgaagcccaattagcaccgttgaagattaaataagaagtaaaaactgcttaaaatgatgtctgttttggagactgagtttaagcagttttttatatagaataatattcaaaagaaaagatgatttttaataatgtaactagtaataactttaaaatattgttgaggacggtaatgtgattttaaaatacggtaagctatgtattaaatagatattgctgttatatttaaataaattaagaatgaatactatgattaacatattattaggaggattcaggttgaaaaatattattgttactggtggggccggctttatcggttctaacttcgtgcactatgtggtcaataaccacccagaagttcacgtgacggttttagataaattaacttacgctgggaatcgcgctaacttagccggtttacccgcagaccgtgtggaattagttgttggtgatatctgtgacgctgaattagtcgataagttagttcaaaagacagacgcagtggtacactatgctgccgaaagtcacaatgataactctttgaaagatccttcaccttttattcaaacgaacatcatcggttcatatacgttgatcgaagcttgtcggaagtataatgtgcgttatcatcacgtttcaaccgatgaagtatacggtgatttaccattgcgtgaagacttaccaggacacggcgaaggcgttggtgaaaaattcacgcctgaaacgcgctataacccaagcagtccttactcatcatcaaaggcgagctcagacttgttagtgcgtgcttgggtccgttcattcggcttacaagctacaatctcaaactgctcaaacaactacggaccttaccaacacattgaaaaatttattcctcgtcaaattactaatattttaagtggtattcgaccaaaactctacggttcaggtcaaaatgtgcgtgactggattcatacgaatgatcattcaagtgccgtttgggcaattttaaccaaaggcaaaatcggtgaaacttatttaatcggtgccgacggcgaacaaaacaacaaagatgttttggaattaatcttagaattaatggggcaacccaaagatgcttacgatcaggtgaaagaccgtcctggtcatgacttgcgttacgcgattgattcaacaaaattacgtgaagaattaggttggcaaccagaattcactgacttcaagtcaggcttacaacataccatcgactggtatcgtgacaatgaagactggtggcaagcagaaaaagcagctgtggaagccaactacgctaagaatggtcaataaatatgaaattaaattttgatgggattatcttataattaccgttgttcatataagtgtcctgtccgtaataataaaccgttaattgtatcagttaatgtcatttttagggcagtgattacttttgaaactgattggggatgacgactgcggagccattcagcggtgtaagcaactaatgcgttggaaagaaaactaagtaaaaaggcttggtagtcggtggataacgtaatgtgatgggcgctagcaagatcttgaataatccgattaatcagttgatggacgtgatgaataaaatggcgttcgaaggcgttttgcccttcaatcgacaaagcattttgatagaaggcgcggttagcatcgaagtagttaaatagttgcgccaacacctgtgtccaatgaatatagctgagatgctcgtcgatgtagacaccgatttcttgatcgtaaatccaatctaataacgcatatttatcagggaaataatcataaaaggtttggcgtcgaatgccagttttattcatgatggtggtgacgctaattttattaaaaggttgttcaaccattaattgtttaaaagccgtggcaatcgtttgttgggttgtctgagtcatcagggcatctccttttgaacgttattaagtaaaaagtcgtcattcaagctagtgaatgacgacttttgtattatatggaattgcggtatagaaccattgggcatcagctactgataaacggatacagccgtgtgaattagcttttttgcctaattgctctgcttcttctggaatgaaattgccagcttcatctgtgggcacactgtgaaaaagataaataccatgatctaggaaagagcgccaatatttggcaccttccccggaatttgcattgaaaaatgagtcgccgtgttcagcttcgatatagaaggtaccagttggtgtgggtgactcaggggaaccggtcgaagcatgcattgtgtacaaaagatcattgccatttttaaggtagacacgttgctgtgcaattgaaacgtcgacccataaatcgggttgttcgtctaaattaggatatggtttgttttcggaaggcgcacgccagtcaattggtgtcgggtgagccgctttttttgattttatcgattgttgcctcgcatgcgattgtgatttggtagaggacgtgactgcggcttggtgtgtttgatgccgagctgaggtagaccaatacccaccaactagtaaggcaatggcaacaatgatgctgccgagcattaatcgaatgttgtttgtcagttttggcatggccgacttccttccgcaataaagtacctccagtatacgggataaagcgctaaacttcaatacggattagcttgctctagcctagtatttaagctaaaatagaccagtaatcacgaatgacgaggagcttatgatggttaataaaaatgcaattattttagcagcgggtaaaggtactcgcatgaagtcaaaattatataaagtattacatgaggtttgtggtcgaccaatggtagatcatgttttaacccaagttgaaagaacgcacccaaccaatgtggtcacaattgttgggcacggcgctgaaaaggtgaaagattatctcggcgaccggtcacaatatgcattacaagctgaacaattagggactggccatgcggttttacaagctgaagctttactgaaagatgaagatggcattacgattgtggtcagtggcgatacgccacttttaaccgctgaaacctttgaaaaattatttgcataccaccatgataaaggcgcaaaggcaacgattttaacagcaacggccccagacccaacaggttacggccggattatccggaatgatatcgggattgtcgaaaaaatcgttgaacaaaaagatactaatgataaagaagcggctgttaatgaaattaatacgggcgtttattgctttgacaacaagaccttattccaagctttgcacgaagtgacgaatgagaacgcacaaggtgaatactacttaacggatgtggttgaaatcttgaagaaaaaaggcgaaattgtcgctgcttacagaatgccaaactttgaagaatcaatgggtgttaatgatcgagttgctcttgctgcagcaacaaaagtgatgcgtaaacgcatcaatacagaacacatgcgtaatggtgtgacattaattgatccagaaaatacttatatcgaagtgggcgttcagattggtaatgatacaattgttgaacctaacgtcgtcttaaaagggaacacaacaattggttcagattgtttcgttggtgctggctcaactattattgattcaacaattgaagacaacattcaaatcacaagttcaacgattgaatcagctatcatgcacacggggtcaaacattgggcctaacagtcatttacgcccaaacgctgaaattggcgaagacgtccatgttgggaacttctgtgaagtgaagaatgctaaaattggcgatcgcacgaagattggccatttaagttatgttggcgatgccacattaggcactgatattaatgttggctgtggcgtagtctttgttaactatgatggcgtggctaaacaccacgcaaatgttggcagccatgtcttcatcggtagcaactcaaacattgtcgcaccggttgaaattgcagatcacaccttcattgcagctggctcaaccatcacggatgatgtcccagaaaaggcaatggccatcgcccgtgcccgtcaaacaaacaaagaaaactactgggcaaaactaccagtagcaaatgacgaagaatggcaatagagtgctggctgtggcagttagtaattgagcattaatacgatgttagattaagcggaaattacggtgacaagaagcacgttttggattaaagtgtgtttgtgacgattagcttagtgttgtaaagcacatcttaaaataaaaatcgtccgtaatcttatttttgagattacggacgatttttttgatacttgtagttattttaaagttgagaaataatcgcgtattaagaaggcgattagaaaagcgggccaaatccaaattgaaccacttgaaaataagattagaagaagtatgataagactcccaacagcggtggttgcccagcccatttttgtaatgcgataatttttaggattatagttcgggtgactggggtagaaaaaatgatactgataaatcaaaacggcaacgaatagaataagaccaagaataaaatagggcatgctgaggtgaaataagcgatcggaagtaataataattaccagaattaaaagatagagattattaaaaatagtgtatttaaggcgggtcatagtaacctcctttttcaattagtgtaccttgtcttgcgctaaatgacaatttaatccataatccaaaataaacaagcatttttggggatataatgggatactaaacgggaggttcgatggtaatcgctattaactttttctttttctctcacgtttctaatgaacagcgcttactttacaacatttgtgaactttttaagttttaatcttgatttccggggtgaaaatgcctaaactttaaataggtactaacataaatttttggaggctgacatgtctgaacaatatttcgaccctaagttgaaaatctttgctttgaactctaataagcccttagctgagaaaatcgcggctgaagttggggttcctttaggaaaatcttctgttaaacgttttagtgatggtgaaatccagattaatattgaagaaagtattcgtggcgacgaaattttcattattcaatcaacatctgcaccagttaatgataacttgatggaaatcatgattatgattgatgcattgcgtcgtgcatctgctaaaacaatcaatgttgtgttaccttattatggttacgcacgtcaagatcgtaaggctcgctcacgtgaaccgattaccgctaaattagtggctaatatgttaacgatggcaggggctaaccgaattttagcattagacttacatgccgtacaaatccaagggttcttcgatattccagtggatcacttgatgggtgctcctttattggctgattatttcttgagcaatgacttggctgaaaatgctgttgttgtttcacccgatcacggtggggttacacgtgctcgtaaattagctgatttcttaaagacaccaatcgcaattatcgacaaacgtcgcccaagaccgaatgtttctgaagtgatgaatattatcgggaatgttaacggtaaacgcgcaatcatcattgatgatatgattgatactgccggcacaattacgttagctgcgcaagcattgaaagatgctggtgcaacagaagtattcgcatgttgtacacatccagtattgtctggcccagctattcaacgaatcgaagattcagtgattaagcaaatgattgttacagattcaattaaccttccaaaagaaaaattaatcgataaaatggtacaagtttctgtcgggccacttattggggacgccatcaaacgaatccatgaaaacaaaccagtcagtccattatttgaaaacagatttaaaagataagcgtgctaactcgaatgggttagctttgagaaagcacatttcaataagctaacaattaaaaacgcctgaacaatttgttcaggcgttttttgtgactttatttttctttgttagctaataaatcgcgaatttcttttaagtaaacttcttctttcgtttcgactacttgtgcttcttcttcttcggtcttcttgcccatgtcacgaagcttgttgaatcctttgacgattaagaagacaacaaatgcgatgattaagaagttaatcacatcgtttaggaagttcccgattttgaaaacagccttggtgcctggaatggtaagcgcaataccggatagatcaacttgtccaacgaataatgaaatgattggattgattaagttctttgttaatgagtccacgatgctttttaaagcagcccccaaaataaccccgacagccatatctagcacattaccacgcataataaattctttaaattctttaatcatgaaaacgacctccattaatattattaattattgctacaaaaagtataccgtatttccagagcctataaaataaaaatgctgtactagttacataattaaccaataaatttgttattttcatgaaaaatcgttaagatagtcacaggaattaaataacagaaattagagatagaggaaccttagatgaattggattgtacaattgtatcaaccattctttgaactgagtaattggcaaactgtcattacgtcgtccgaagattggcttttaattttaacgttagtgattatggaatgcttactctcagtagacaatgctgttgtattagcggcacagacacaaacattacctacaaaaattgagcaagaaaagtcattggtgtatggcttatggggcgcttatgttttccgcttcattattattggtgtcggcacctatttaattcatttgtgggaaattaaagttgccggttcattgtatttaatttacttagtcattgcttatttcagaaagagtgggcatccgaagcaggctaaaacaccggaggcgggttctaaaatcagtagtccgcatcggttctggcgcacagttgcttcgattgaattgatggacattgttttttcaattgattccgtattagcgtctttagcgatttctagtaatccggtgattgttttaattgggggaatgattgggattatctgcatgcgggggattgcccaactcatcgcccaattgatgaagaaaattccggaattaaatccgatggcttacatcttaattctcttcatcgcgattaaattattcttgtcgattccagccattgactatgaaattcctaacctagtgtttgctggaattgtgtttggcgttattctactgacgctcattattcattatgtccgtgcagcacgggctaaataggcatcataaaaaagccgttgtggacaaattgtccacattggctactaagtgggtaaaaaaaaccattaaccaaccattagcaccctaaaaaagcctaggtcagacaaataatagttgtctgacctaggcttttaaagtgataatttaatcgtttgcgccacagtcttagaaatcccgagtgcttcgagttccgccactgaagcttctttgatatgtttcatcgaaccaaaattcttcaagagttttgtccgcgtcttaggaccaacgcccttaatatcatcgagtttagaactcaaggagttctttccccgcaattggcgatggaaactgatggcaaaacgatggacttcctcttgaatccgcgttagtaagtagaacccttggctctttggatccaactgaatggtttgatcaacttccccatataacaacgaggcggttttgtgatgattatccttgaccatccctgcaacgggaattgatagccctaattcgttctctaagacgtctttagccgcattgagctccacaattccaccatccattaaaatcaaatcaggcagtggtttatcctctttgagcaatcgcgaataccgccggaaaatgacttcccgcgtattggcatcttcgttggcgcctgcgcgatctgtcgtttgcgttaacttatacttgcgatagagtgtcttctcggcacggccatcaacaaacgtgaccatcgccgagacaggatcagtcccttgaatatgtgaatggtcaaacgcttcaatcacgtggccatgtggtaagccaagcgcgtccataatctcatcttgcgccccaacggtcttgcggttgtcgagttccaataaacggaacttctcttccaacacaagccgactatttttctgcgccatttccatcaacgcttttttctcaccacgttgcggcgtgcgaatcggcacattcaaaatttcggtgaggactttcttttcgaccccttctggaaccagaatttcgcggggtaacacattattcttgcggttgtaccattgtaaaataaaggttgccaattcttcttcaggtgtgctgacacacgggaagagccgcttttcacgccgaatcaaccgtgcttggcggatgaagaagatttgaatcgataaccagcccttatccaaataaaaggcaaataaatcgcgcggggtattatcgttagaaataattttctgcttttcaacggtggcttcaatgtagtggagttgatcgcgcaattctgcggcgcgttcaaactgcatctcttcagcagccgtagtcatcttggccgtcagttcttttttaaccggatcaacttgcccattcaagaaacgtttaatctccttgatttgggccgcatagacactctcaggcacttctttgaaacacgcgcccaaacattgacccatatgataatacaaacagggccgcccttgatgtccctgacagcgtcgtaaaggataaacccgttgtaagaatcgcaatgtttcttgggcggcatacacgtccggataagggccaaaataaaagccgccatcttttttgacatcccccgtgatcagtaggcgcggatcgcgttcattcgtaattttaatgtaggggtagcctgtgccccgcttaagtttaatattaaagtaaggttggtgtttctggattaacgtaatttccaacaaaaaggcctctttatttgtcgatgtgatgattgtttcaaaatcgacaatttcagagaccaatttggccgtttttccttcgtgactactcttgaaatacgagcgcacgcggtttttaagattttttgctttacccacatagataatcttggcattgatatccttcatgatataacaaccaggtaatgcgggtaagagtgctaatttatgttcaatgtgttcgcttgccaaaaacaccactcctttaattcaaaacaagtgttcgtctttctattttacgtgtttttggctaaattgcaactattgtgctaggaccttggctaaaaattgttgcgtccgttcttcttgcggatggtcaaaaatggcttcggggtcccctttttcgacaatttgactatctgccatgaaccagacttcatccgccacttcgcgcgcaaaccccatttcgtgggtgacaacaaccattgtcatcccttcttgtgctaagtcttgcatgaccttgaggacttcgccgaccatttctggatcgagcgcagatgtcggttcatcaaataacaatacgtcgggtgacatcgctaatgcccgcgcaattgcaatccgttgtttctgcccaccagagagttgatcactataagcatccgccttatccgctaaaccaacgcgttcaagcaacgcttttgctttagccgttgtttcggccgctgattctttcttcactttttgtggcgccaacattaagttatcgaggacagttaaattggggaaaaggttaaagttttggaaaaccatccccatctttgtccgaatctgatcaagctgtttttcagataacgtcatcaaatcggtgccttcaaacagaatttggccactcgttgggtcctctaaacggttcaagcaccgcaataacgtactcttacccccaccggaagggccgatgacaacaatcacttgaccagcttggacttcaccactaacaccatttaacacgaggttgtccccatattttttaaccaattgattaatcttaagcatgttgcatcttcctttccacatagttcaaaagtttcgagagactaaaggtcatgataaagtagatcaccatcgcaacaaaaatcggtgcaacgcctttataagttgctgattgaaccactttgagttgataaattaaatcagtgaccccgataatggaaacgattgaactttccttgattaaagaaatgaattcgttccctaaagcaggccagatattcttcagggcttgtggtaaaacaatgtaacgcattgtatcgcgttgtgacaagcctaaacttcttgaagcttcagtttgcccagcatcgatcgcattgatccctgaacggataatttcagcaacatacgccgcactatttaaggaaacggcaattacccctgccaaaagtgctggaatgttgacccataagccaatcccgaagtagacaaacatgatttgaatcatcaacggtgtgccccgaacaaattcgatatacatgactgccagcgcacgcaccaacttattcttggccaaacgcccaaaggctaggaggaccccaattaaaatcccaattgcaattgaaacaatcgtaatgaataatgtgtagccaatccctttagcgaagtatgaccaatagtgccacatgctagtgttgtgcgtattgaccttcatgagttggcccgcgttctttaagtattgcggaattaatttttgctttttaatttgcccgatactcttattagcagcagcgactaaggttggcgaatcctttggaaaggcaatcgctgatccttgcatgtctgcgcctaaatcaaatttcccattaatttgaacgagttctggatcattacttgcataggcggttgcgactggttcttccgccacaatcccgtcgattttatgactctttaatgcaaggacgagatctgggactttggccaagcccgtaatctgcgcatctttaatttgctttttagcgagtgtttgttggagactccccgtttggacccccacttttttcccgttaaaactatttttggagtggtaaatcttcgcatcagctttattgactaagattgattgaccaccgagataataaacatcagaaaaatcaacactcttgcttcgttcatccgttggtgacatcgccgaaataaccatatcgactttaccggtttccaaaccaaccaataacgcatcaaagtccatcgacttcaccactaacttaacgcctaaatcatcagctagcttctgtgcgacttgaatatccataccgacaatcttgttcttaccgtttttattcactaaaaattcataaggtgcataatcggggctggttcccaaaaccaacgtttttttagcttgcacttggctaaccgtctgtccagctgccaaaacgggctgctgctgaatcatgaaaaacgttaacattaccatgaatggtaacccaacaaaagtgagtaattttttaatcgtcatattatctcctcctctgattaggactatcatacaaccaattaaataattatgcaatatttatttataaaaagtgaatcattggcgaaaccgttattatctggtatgatagatgcaaattagaaaagagggattacgatgggcttaaaagtcactaacaagaccgatttaaccggtttattcgataaattcgcatcactaccagaagaacgccaaaaagttgaagcacaagttgaagaaacagctgataaattaaaaaaggtagatgcagaacaaaaagaaaagcattaaacaaagacagcaaaaaaggcggtaagacaaattcatttttgtcttaccgcctttttgctggtttaaacgtgcgtcatttgcaatcgcctttcggttaacgcgattgtacgctttattctgcgtgtctttctgggtagcgttgttttaattgttcaatgttttcgcgcgcgactttatcaaagtcgaggttattccattccgcaatttgtgataaataccaaagcacatcgccgattttcttagacatcattttttcatctagttcgtggccttggaacgcatattttttaacgatatcaaccacttcaccactttcacttgctaagcccaaagctaagttagttaacacttgttcgttaccatataacgttcggttggctaacttttgatagtcattaaattccattatgcttgtccccctattgcacattgcttttcaatccattcccaaactgtctctttaccagcaccagtcagtgcgctaaagcagacaaattgatcgactggattaaaatcaagcgcttctttgatgattttttcttgacgattccatttccccgttgagatcttatccatcttagtagcaaccactaaaacagggatatcataatacttcgcaaaaacgtacatcgcgatatcatcatcggttggttcgtgacggccgtcaattaatgaaataagcccctttagatttgagcggctggttaaataagcctcgataatttgcccaaacttctcacgttgcttctttgaaactttggcatacccataaccagggacatcgacaaagtaaagttcgttttcaacgcggtaaaagtttaaagtctgtgtcttacctggcttgctagatgtccgggcataactcttacgattgattaatttattaatcaatgaagacttaccgacattcgagcgaccagataacgcaatttcaggtaattgatcagttgggtactgcgaagcagctaccgcactcatcaccatttcaacatcatgtacttccataataacctccgattatttccttcgaatgttagtttagcataaataaataattattgcgccgttgacatctctctagtttcatggttaacatatcttcttaaccccgttaaatcgcgtcattgtaccgtttcaaaagtcccttaatgcaaaaaaactgccgcgacaaaatctaatttgtcccggcagtcttttaatttttatgacgcttcttgtccgtcagctaaaaagagttgtgggttggctgtgccatccaccgcttctttcgttacaacaactttagccacgtcttcacgacttggaatatcaaacatcatatccatcatgacttcttcaatgatcgaacgtaaaccacgggcccccgtgtttcgttcaatcgctagatgtgcaatcgcatggagtgcttctggtgtaaattctaattcaacattatccaaggccatcaacttgctgtattgcttaacgagcgcgttcttaggttcagttaaaatatgcaccaaatcatcttcagtcagtttttccaatgcagcggtaatcggaatccgaccaatgaattcaggaataatcccaaatttcattaaatcttccgttacaatttgttgcattaagctttgatcttcattggtagtttgaccattcttgcttccaaaaccaattgtcttttcacctaagcggtttttaacaatcgtttcgatgccgtcaaaggcgccaccaatgatgaataaaatattggtcgtatcaatttggattaactcttgttgtggatgcttgcgaccgccttgaggtggcacactagcaatcgttccttcaagaatcttcaagagggcttgttggaccccttcaccagaaacatcacgcgtgatcgagacgttttcactcttcttggcaatcttgtcgatttcatcgatgtaaatgatcccgcgttcagcacgatcaacatcgaagtctgcattttgcaacagcttcaagaggatattttcaacatcttcacccacgtaacccgcttcagttaaagtcgtggcatctgcaatcgcaaatggcacatttaaaatccgcgctaaggtttgcgcaaggaatgtcttcccggaaccagttggtccaattaacgcaatattactcttctgtaattcagtatcgccttcttcggccactgacatttggttgacccgcttgtaatggttgtagactgcgacagataaagcttttttcgcttctgtttgaccaatcacataatcatttaaaatggctaaaatttcttttggctttggcacttctagtaaatcactgaaggcctcatctttaaactcttcatcaataatctctttgcaaaggtcgatacattcgttacagatataaacaccagggccagccacgatctttttcacttgatcttgcgacttcccacaaaacgaacacgttacgggtccgttagttgtttctgtatcatctagcatactgggattctcccctttctcgatatacgcttaccgctgtgagtcgttaaaatacacccctacaacgtaattcagactatagcataactatggtctagaataaagtaaagttactcgcacaccgtcaatgacacaaaagcgggtccaaagtaaacaccttgaacccgctttttagcatcatttaaagcttggattgatcagacgaccttatttatcgtctttcacttctacagctgaatcagcaatgatttcgattgctttcttaacaccgatatcatgttttaacatgtcatctgataagacgctacgaacagcagcttcttccatattgtattgttcagctaaactcttaagttctgcagcaacttcttcgtctgttgcttcgatgttttcagcttccacaacggcttcaagtacaagacttgtcttaacgcgtttgtcagcatcaccagcgaattgtttcttcaaatcatcttcagttgtaccagtgatttgatagtacatttccgggttgataccttgttgttgcatgttacctaagtattgttgtaattgactgttgatttcttcgtcaatcattgcttgaggtaattcagcgattgttgcattttcagttgctttagcaacggctgtatcttggatagcagcatctgcagcatcatttttttgttgttttaattcttcacgaattttttcttttaattcgtctaatgtatcaacactttcgtcgatatctttagcaaattcgtcatctaattcaggtaattccttagctttcacttcatggattgttaccttgaagatggcttctttaccagctaattcttctgcttggtaatcttcagggaaggttactttaacatcaacgttgtcgtctgctttgtgaccgactaattgatcttcgaaacctggaatgaatgaatttgagccaagttctaatgaatagttgtctgcttgaccaccatcaaaaggtacgccatctacagaaccagcataatcgatgacaacagtatcgcccttttcagcagcggcgtcttcttttaataccaattcagcttgacgttcgcgacggttttcaatttcttgatcaacgtctttgattgtaatgcgacggctttgttttggtacttctaagcctttatagtcgcctaaagttacttctggtttaacggtgacttgagcagtaatcacccaaggttcgcctttttccattttttcaacattaatttgtggttgatcaactggttgaatagcagcttctttaacagcagcatcataagcttctggtaagattgcatttaaagcatcttcataaagggcttcttcaccatacatcttgttaaagatttggcgaggcattttacctttacggaaacctggtgtgttgatatttttacgtacacgtttgaacgcaacgtccaaaccttcactaattttatttaaatcaatttcaaaggttagttcaccatcattggtgccctttttttcccattttgctgacataatttccctccgacagttatattcacaatctatcaattgcatacttaatcagcataaactatttaacctaaattgtaaatatttattggtctaaaaagcgataaaatccgatattttagtcgtttcaggccaacttttatcgaatttaatgcacaaaaaaactcgcagtttttacactacgagtttttcgattcaactaggttgaatattagtcgataatttcactaacgacaccggcaccaacagtacggccaccttcacgaacagtgaacttaagacctttttcaatagcaactggtgagattaattcaacagtaaatgttacgttatcaccaggcataaccatttctacaccttctggtaattcgataacacctgtaacatcagttgtatggaagaagaattgaggacgatagtttgagaagaatggtgtatgacgaccaccttcatccttgctcaagatataaacttcacccttgaagttcttgtgagtttggattgaacctggtttagctaaaacttggccacgttcgatgctatcgcggtcgataccacgtaataaagcaccaacgttatcgccggcttgaccttgatccaatgtcttacggaacatttccaaaccagtaacagttgtcttagcaacttcgtctttcaaaccaacgatttcaacttcgtcaccgacagtaacttggccacgatcgatacgacctgaagcaacagtaccacgaccagtgatcgtaaatacgtcttcaacaggcatcaagaatggtttgtctgtgtcacgttctggagttgggatatattcgtcaacagtagccattaattcttcaacagctttaacgtcgtcagcattgccattcaatgcaccaagtgctgaaccgcggataactggaatatcgtcaccagggaaatcgtattctgataataattcacgaacttccatttcaactaagtccgttaattcgtcatcatcaactaaatcagtcttgtttaagaagacgatgatgtagtcaacaccaacttggtgagcaagtaagatatgttcacgtgtttgtggcatagggccatcagttgcggcaacaactaagatagcaccgtccatttgagcagcaccagtgatcatgttcttaacgtaatcagcatgtcctggggcgtcaatatgtgcataatgacggttttctgtttcgtattcaacgtgggctgtattgatagtgataccacgttctctttcttctggagcagcatcgatgtttgcatagtcttgagcttcagccaagcctttgtctgccaacatctttgtgattgctgctgttaaagttgttttcccatgatcaacatgtccgatagtaccgatgttaacgtggggttttgttctttcgtaatgtgctttttctgccattaaaacgaacctcctgtattttcgcaagaaaaaatcagtgtttagatttactaaactgataatcctttacataatattataatacttcaagcgctaaaatcaaagtgtttttttacacttgaagaattcaaaaatgattatatctgctatgagcgcgtttgtaaacacttaatgctcaaaaaaagtcagttttgaaacgatatttaggtgttttctactctaaaaatcaagttttcctgtcatttcttgcaactttttcacccagtcctgtatcttttctgaaataaccactgacgcggtataatccggacccagtaactgtttgagccatgcttgcgcccactccgtaggattatacatgatttcagcttcaaaaggatataaatatgcaaatcccatctcaacatccgccatcacttgtgctaacaaagtcggatcttcagtggctaactgctcatttaacgccgctaacaccgcattaaacgtcgggctctcctccatcagttggatatcggcaggtacaaaagtttttgtctgttcaaaccattgcatcgtgactaattgttcaatattcagctggacgagcgtttcaatgacagtcgtcttcacgaaagcatgactgtaaggattcgttaaaatgggcgcaatactggtgacataaacattacgtggtaattgttcagcctgcgtcaacattgctagctgttcagctaatgggtgcgcagtgaggttatagaggccctctgcttgcttttgaatcgctgcttggtgattcgcttggtattctaattccgcagccgtaatcatcattctaagcgtcttaatgacttgcggggcaatcgtcgcatggcgtaatgcctcccacacttgatttgccgtaataaaacggtggttattcagtaataatgcaagataaaaccgcactaaatctgtttgttgtaagtagtccgcttgttgttcttcgacgattgtcaatgctgtttgcggatcaccagcttcaatcagcgcactggaccacaataaattcgccgacaacgtctgttctagttgatacgcagcttcaaaatggtcgcatgcttgctgccaattttgttgatttaacgctactttccccatccgtatcagccgatcatactgatctggaaattgcgtaatgtcacccattcaatcacttccttttgacaattaataaaacaatagcgcctagaatcaactgacctgatccagacgctattgtttctaaatgttattcagcggctttttcagcctttggtttattatcttttctttgacgacgatgattttgattaatttccataatcactggtagaatcactggccgacgtttcgtttgttcatacaagtaatgacttaagttttcccggacatcttgtttcaaatgactccagtcaaattctttgttgtccagattattttgcaccgcatttttgataatttcggcactctcagccattaaatctttgctagtcttcacgtaaacaaaaccacgtgcggtgactttcggttccgcgataatcttcttattcttgcggtcaatcgtaacaacagcgataaaaatcccgtcttctgataataatttccgatcgcgtaaaacgatattcccgatatcgccgacaccgctaccgtcaatcatgacgtcagttgcgtcaacttgtccgccaacatgcatcttccctttttcgtaagcgacaatatcgcctttaccaacgatgaaaatatctttgtaatccattcctgtttcatgagcaatatcagcgtgtgctgctagttgccggtattcgccttgaacaggcattaagaattttggttgcattaaattcaacattaattgcaagtcattcttattggcatggcctgaagcatgtaaatcatcgccaaccgccttaacttcgccacccgcacgataaatcatatctttggtcttcgctaaaatcgtttccatcgcgtgtgaaggagatgtcgttaaataaaccaagtcgccttcttcgatgtgaattaaacgatgatgactagttgccatcttttgaagcgccttgattggttcgcccatccgacctgtttctaagatcactgtttgttctggtgcaagtgtgcttaaatctttaggttggaccaagatatcgtcatctggcaaaataatcatcgataatttcattgctgtccggacgattttttctaaatcacgacccgttaaaaccactttacggcctgttttataagccgcatcaatgacttgttgaatccgcataatatttgaagccactgaagccacaatgatccgacccgtttgatacttgaacgtttctaagatggattcagcaatatcgcgttcgttagccgttgcaaatggtgattccgcattagcagaatcactcaagagtgctaaaacaccttgtttgccaatttcagctaagcgtgcataatccgtttgatacattggcattgctgattgatcaaacttaaagtccccagtataaacgacttgtccttcatccgtcttaacgacaatccctaatgaacctggaattgtatgcgttgtcttgaagaatgaaacggttgcgcgttcaaaatcgattgctgtattcgcatcgatgacgtggaagttttggaacttacgtaattttggttcactgctaaccgtaattttagctaaagcaatcgttaattcagacccaaagactggtacatcatgttcctttaagaaataaggaagcgctccaatcgcatcagcatgaccatgtgttaggaaaatcccagcaacacggtctgcattttcttctaaataggtcatatcaggaataacgatatcgatccccaataattcagtttctggatatttcaacccacaatctaatacataaatttcgtcgtccacttcaacaatgttcaaattcttaccgttttcacgaacaccgccaagtggcataatcttaatgttactcattctttcacctctagcacttgaggaatttattccccaaactattttgtttgttttagtcgttcattcgtttaaaactcatccgccttaaagtctaactcatattttatcacaatttaaacaaactaacagcttttgattactaaaagccttttgagcacaaaaaaagcgggtccgcataacggacccgctttttgaaaatgaattaacgacgtaagccaaggctcttgattaattcacggtaacgttgaacatcgctttcacgtaggtaacgtaataagttacgacggtgaccgatcttcttcatttgaccaacatatgaatggtgatctttcttgtgaacagataaatgttcgtttaatgagttgatttctgcagtcaatacagcgatttgtacttctgctgaacctgtgtcgccttcgtgacgagcaaattggttaatgatttcgttctttttttcttgtgaaatagccatgctaatttccacccttctggtataatagcctagaacaacgtaaagcgtcgggtgaacgtcgctaaacagagtagtaggcctgtgcaataagcacttttcaagtttactaaatattagcgtcaaaagcaaggcacagtttcaaactatttaagcagtcaagttgaaatactttacaagtttttattgcaatcactctcactattttggtataataacgactgttgaaattaaaaatcttttttataaagatagtgaaacccatcggaggtgaacaacatgccacaaattaaatctgctatgaaacgtgtgaaaacaattgaaaaagctaaccaacgtaacgcttctcaattaagcacaatgcgttcagcaatcaaaaagttcaaagctgctaaaacagcaggcaacgaagaagctgcagacctattgaaagctgctacacgcgcaatcgatatggcctcaacaaaaggcttaatccatgccaacaaagctggccgtgacaagtcacgcttaaacaaaatgatggctaaataatttaaccacaaaaaagcccccacaaccatttggtttgtgggggcttttttgctttaagcaacatcatctgtcgcaaattgtaacataaacagttcaaacaataaggttgcttcaccttgcccagtctttattttttcttcaatgccctctaaacctagataggcttgggcaagcgtcgccttagaaaagtgccgaatttgttgcaatgctaatttgatgcggtatgggtgaatttttaagacgctcgccaaattaccttggctataccctttttcaaaaagaattttcacttggagtaacaagcgaaattggcccaacaagatggcgttaattttcagcggttcttctttttgtagcaataaatcgtgatacatctctaaaaccggaccgacctttttttgtaaaactaacggcaccaattcaaaaacattatcttcaatactacttgccactaatgcactaacggccgtttcagtaatcacccggctttgttgcgcgtaaagcagtaatttgggtaactcagccataatctgactgtaatcaccattagtcttgcttaacaataacgtcattgccgctggttcaatcgtgacttgttcactttgcagttgcgctgtcactaactgctggacctggcgctcattaatcttttgaacgtcaatgacagttgccatcttcttcagttgtttaacaatcttcttgcgttcatccaacttcgcgtatggcgcgaagataacgagtgccgttgtcggttgtggctgttctaaataagcttggaatccttttaaatcatgatcaagtttagttttaactttttcacctgttaagaagaatggattctgcataaaaacaattcgtcgctcaccgaaaaagggggccgattccgcatcttctaatgcccgcgccacctccgtctgggcgagatcataactcgcaaagttcatcgtcatttcttctgtcgaaagcgttgctttaaataacgctctaacctcttcaatcagcgctgactcttgtcctaatacgagatacaccggtgcaaacgttcctcgattcagtgctgtttttagttgttctgtcttcatttagtcacaatcctttagtgttgttttaatcattggcacttggccaaaaccatagcgccattccagcatcccacagtcagccgtattccaaaatgggacgttcgcacgttttaaagtctgcaacgttgcggcatgtggatgaccataacgattatggcgtcccgcagaaatcaacgccccttttacctgccacgtcgcaattgactggggatcactcgccgtttgactgccatggtgacccacctttaggtaatcaacgcgtaattgtgggtagcgatcaacgattgccacttcacccgctttttctaaatcaccagtaaataaccaactcgcaccaccaatttgcgtttgcaaaacgagtgagtcagcattcccgcctggtccggccaccactggcgctaacacattgatttgttggtgaccaatcataaaatgttggtccgccaaataaggctcaattgcaacttttgtaagatgcggccgcacttgccgttgaaactgccggttttgcggtaagcccgcagcacaaatcaaccgtttaactcggatatgttgcataatttcatttaagtcccctatatgatcagcatcctgatgcgataatgcgattgcctctaaatgatcaatgccacagctgtagaggtaattaactgttactttttccgcccgactcacaatttgccgccgttgccacttttcttgcggtaaagctagtcggccgccggtgtcaattaacaggttatgtcgattgaagggttgttgaatcaacaggctatcgccttgcccgatatcaaacataatcacgcggccaaccggattaaagtggataccaataaaactaatgacatacaggctgataacagccccccagccccactttactcgccgaccagtacttgccatcaaccatagtgtgcctatcacaattaaaaagagtggtattagctggattttaccgaaagtaattgtcgcatatgggaacgttgcaatccaagctaatcctttatacagcgtcgttagcaggccttcttctaaccaaactatcatatgactaacaggccataagcaaatcgctaccataatcaaacccaacatgactggtaagaaaatcggcgcgacaatcccattaatcaaaatcgtcaagatatgccaacgataattaaaccgcaagcacaccggtaaacttaacaagcctagccaaaatgccgttgtaaaagtaccatggcgccgctgataaatcaatccaaaagccatcagatagctcagcaatccccccatactgattaataaatacggctgccataaaagattgaccagcaatacccaactccaactatctaaacgcgattgctgaaaatgacttacttcgcagattaatcgtagtaagatcagcccgatagcgcgtgtaatactcgtgcctccccccacaaacaacgcataaaggggtagcaaacaaaacaagctaacattcacccattcacgcgggactcgacacagcgttgccaatcgacgaatgattgtcacaaagtagaatacatgcaatccggataaactcaataaatgaataatccccaattgacctaacacattctggtaggccaggccatctgactctcgaacaccacataacaacgcctctgcatgaaaactcaacgctggtggcaattgtcggagataaatcagcccctgttggcgccgttggtggaaccaatctagccaaccttgtggtggaatgcgtctaaagaccgttccgtcaattatatttgcttgataaaaacaatgcttttgctgccccataaagcgcgcatagtcgaactcattccggttagtagcaccttggatacgctctaattcaatatcacccgctaataataacggctgattcgtcgtttgccaacggcgtttttccgctgaactctggcagcgatagtagcaaacaacacgttggtcatcattctgcccctgcgccattaattgaatctgatcgccagccactttgatcgtatcgggttgaatcttatatacttgattatttggtctaaccggctgttcgtaggtgcgccgtgccagccaaaaatggcaaccgcctaaacacagtaccagtccactgaccattaacacagctggttggcgtaagcaccacagtcgcagtagacacactatcaaaagacagctaaaaaaaagtggtgcttgtcctagtaataacgcatttaaacttgctaaacaaataactggataaacccagttattcttaatcactcagcagtttgttcattctccaaaaagttaacgagggtgttggcgtcattcgccgttaaatcgacttggtccaattcaataccagatttttcaatcaattcatacgcatattcgtcgttatgataatccttttgataatggattttactgatcccagcttgaataattaatttagtacactgaagacatggaaaatgtgtgacataaatttcggccccttccgtctgcacaccaaacttagcgcattgagtcaaggcgttcatctcggcatgaattgttcgtaaacaatgcccgtcccgtaataaacagccaacatcgatacagtgactttcatgtgccaccgaaccgttgtagcctcccgcaataattcgccgattacgaaccaccaacgcacccacaaacaatcttggacaggtgctacgcatcgacaacaagaccgattgaagcataaaatattgattccacggcattctcttttctgacacacgaattccccctttaaagttaatagttttagtatagcaaaaaaataccattcacaaactaattaacacaaatttgtggccgtaattgttcaaacgttttcggcccaattcccccaactttttgaagatcttcgatttgtttaaactgcccttgctcatcccgatatgcaattatttgttcagcttttttaggaccgatgccatttagcgtttgcaattgtgtcgcatccgcttggtttaggttgattttagcatcagttgatatcggactggctcccgcttgattgtcagtcgcagcctgtggctcgtctgccgctttcactaattcttcggcttgcaccgcttctcccttagttggcacatagataataagttggtcactcaatgtttgcgctaagttcaactgactcgtatccgctgcttcggtcacatcccccgcttgtttcagcacctcaaataaacgcgtctttgcaacacaaatcggataaatccctggatgtgccacagcgcctttgatatcgacaaacccaccttttgagacgcttttcttctgtttgacgggttttgccttcacttttcgcttagttgattgcgccatcaattgttgattggttgatagaaaacgttgttgccgactatgctgccaaaacacaccaccactaagtaaaattatcaccaaacaaggtacccaccagaatcgacgataccgttgccaatagtcgcgccacatttttcgccacctccttattcctaattaccccaaaacgcaaaaaaaatttgccgattctttcgaaccgacaaattttttaatgtttggctaaataatccaatgcgtcgtccaagtttttgacaggaacgattttcatcttagtaccaatttttttagcggctgctttggcaatcgcataattattttgataatggggttctacctttagtatggcttttgtcacgggatcatcaggtgcgaaaaagactttggcgccttcttgactcgcaatcagtaccttcttatcaattccgccgattggtcccactgtcccatcaggatccattgtccccgttccagaaatcttgcgaccacccgttaagttttgtttcgttaattggttataaatctgtaacgtaaacatcaagccagcagaaggaccaccaatttcacccgcatcaatcttaaccggcacttttgtcacaatttttgagtgatctgtcagcgtaattcccaaaccagcgtagcgcgatttaggtaatttaatcaatttacgggtcgcagtcttacgctggccattatgttcatagctaatcgtgactttttgattcactttaagcccttgaacatacttgacgaacttatttgcactcttaaattgatgctgatcaattgccgtaattgtgtcaccaatagccagatcttttttaaaagctgaattatctaaaattgacatcacatagacacccagatattgagtgtggtattcctgatgtgccttttgataagccgcctcaatcgcaaaattaatcgagctttccatgtagtatttttgaatctgatcatacgcttcagtatcatcgtcacccattagttcatcacgactaataatctccgtaaaaggttgtgttttagacagtaatagctgtaaccccgtcactggtccttgaatcccgacggttgttaacataaagtggcccttatgttgatctcgttgaccgttaactttaacaaactggttggtattttcggccgaaccgaccccttcgacgtaataatgcgttgggataaagcaaaaagcaaacacgacgatcaagccaacaatccataggagatgcttcaatagacgtttattcttattcatattaatcactttcaggtcctaatttttgtgcaagcgcagacgcgacaaccggcggcaccaattgttcaacctggccaccaaacgttgcaatttccttcaccatacttgatgagataaaagcaaattcttgctttgctaataataacaccgtttctaaatcagcatcttgtgtctgattcaacgccgcaatatcacgttcatactcaaaatcattggcattccgaataccacgaatcaaatatcgcgcaccgacttctttagcaaaggttgccgtcaacgtcttcgattgtgcgattaccttaacgttatccaagtgttgcgtcgccgcttcaatcagttcaaccttagtggttgcgtcaaataacggttgtttagcagcgttagtcatcaccgcgataatcacttgatcaaacaagtgacttgcccgttcaacagtatcgagatgcccatttgtaaacgggtcaaaacttcccggaaataatgcaattttcggcatatagctgcctcctaaccaataaatttaaagattgctacttctgtaatcccataattctgttgccgtttcagtatgtaatgcggaatgtcagttggataatcaaccgtcgtatcggtttcgcaaagaatcgtcgcgtctggtgctaataaccccatttcgacgaattgttgtaactgaagcaacatctgttgttccttgtagggtggatctaataaaattaaatcgaattgaacaccagcatccgctagtttcaccaacgctttttcagctggcatcttccagattgtaaagcattctggcattttagtaaccgcaacgttttcttcaatcgtttgaatcgctgcatattggcgatcaactaaataagcatgatccataccgcgtgaaacggcttcaattgcgagaccaccgctaccggcatataaatcaagcgcctgcccaccgtcaaaaaattgccccaacatactaaacattgcttctttaaccttgtccgttgttggccgtgttttcatcccagggacagcttttaacttgcgacccccaaattctcctgcaataatccgcatctctattactcctctaattctgccgcatcggcaatttcttgatctgagcgtcctactcgattactgaaatccatatcaatagctggtctttcagaaggggtcactcgtttgacgtagtgtaatttttttaaccgttgcataacagtttcggcatctgccatatctacgtatagataaacatatttcattcgtttcgaggtgtaatacacaagtccgtaacggcgtaattgctttacttgtcgtaatgaatagagccagacgacaattccttggcgttgtgtgatttccaatgtcatttaatcagtccttttacatttagtcaaaaatcatcattgtttgttcatcggtacaaagaagcgttaagtgctgatagcttggattattaatcgcaagttgcaacgctagattctgttgttgtgcaagcaccagcccttgggaattgagcccttgtggccaataaaaaagttgctcgcgctgcggaaaacccgctgctcttaacggagcctgtttaaagtcggttgctgttaaaaaggcgtccgtctcttgtgtcgcttgtttgcgcacttggtgcagcttttgcagtccctttttagtcaaccactgcgttggtgtacttgttaattcactcaccaaattctgtgtattttgcaatggtagttgatttatcgtgagcgcaggttggtcattattttggcgtaatgtctgcaacgtttgcaccaaagcgagttgtcgttgactatctgtttgcggttgttgcgactttgctagctcatccactgggactggtgtttttgaaacaactcgatataaatcagtttgtagcagtcggttcgcatttaaatacatcacagctgtcaatcgttcttgctgcatcactaaagttgcaaacgtctggtttttaaacatcactaacggcgtttgttggtgttgctccggcgttaaccgcaacttaaattgttgctcgtgtaacgtcactaagagcgaagttggtaacgccgtcttcttagttaatgtagcccgcttttgaaaaaaatgaaacggcgccacatcgttgtccgcaccaacaaccatgatttgttgtgtttgattggattggttatcaatcagcgcttcgacatactgtcggctatctaagtgaaataaccaccgtcgttgattttcatcagtcagctgttgctcgaccggttgcccataggttgcaattaattgttcagctggttgattaatcagtttcgccggcccttgtgttttcgtcagtggcgtttgttttattgaccgttcagtcgacggggcttgtgcaaccttaggctgattaaccgctggtgtttggataatcggccaaccataaaggatgaccaaccagacaatcaatgcaacgattaatcggcgtgccccttttatcatgctttcacctcactaattcgctgccgcagcttttttctcttgtgcgctgatgttcaacacgattcccagtgcaatcgctagaaccatcatacttgatcccccataactgatgaacggtaacgtcaccccagtaatcggtaagattcctagcaacccaccaacattgaatagggtttgcacgaaaatgatagtgccaattccgtaacataataaagtgtgatacatcttagtcgcatgaatccctaggtaaaaaatccgtgctagtagcgcaaatagtaacgcgataatcacgagggtcccaatcacacctaattcttcagtggtaatcgataaaataaaatcggtatacggttctggtaagtaaccgcgcttttggatactattgccaagccccaagccaaaccaaccaccattattaatcgcatagtaggaattcactaactgactcccacccatattttccaattcaaatggatgtaaaaacgataaaatccggttgaacttataagaattaacgttcgttgaaaagttaaagtgccgtaaaatactaaataaaatcataaccgttgttgtgaccgctgtaatcagcgaaaaaccataccaatatgacataccggtgccaaaaaacatgactaccatcacagcagccaagatactagcgccccctaaatcaggttgaataaacaccagtaggatgattccagcgactaatacaaccggactaaagaataattttaaattatcaacaaatccgtcggccagttcattttccttacgcgagagcatattagcaaggtaaataacaatcaataacttcgcaaattctgacggttgaatggtcagtggtcccaattgaatccacgcggtagccccattaatcgctgcgcttggtctgaaacgacttaacagcaataaataaatgagcgccaagaaaaccacaatcgtcattgcttttagaaaagtgcgattttttaaaacggataacttaagaaaatatgtgatcatcatcaagataaagcctaatgcgataaacactaattgcttggtaaaatacgcatctggtttcattccgcgaattgacattaaatccgaactcgccgaatagaccattaaagcaccaaatgcacataagataacatatggtagcaataaccaatagtctaaatactgaattttacttttttgaaactttttccacacagttacacctaatttctatttcgttcgtattcagcctgtccttgcccaacttgcatgccaatttgattgacccgttcttctaactcacgcatcaaagttgcaccctgtggcgcactaataagttgcatccgttttgcaaaatcaacctcgcgcgagaaaccaaataattgggtatcaattacctcttcaataattggacattgactcatacaaagcgcatcaatttgagcacgcaatagttgctcaatgcgtagcgcatccgcttctaaagtgagataagctgttgttttttgttcaatcataatttacgcctacctattcgttattaaaaagcatactctgttcgttattataccatatttatgcacaaaaaaaggtagccaagcggctacctctaatggtttttaatgattaaccttttttacgtttcttatcagctttttgacgcatacttgtgtcaagaatcttcttacgtaaacgaacagaagtaggtgttacttcacagtattcgtcatcgtttaagaattcaattgattcttcaagtgacatttctttaggtgtcttgatggcagctgagtgatctttaccagaagcacgtgtattcgttaagtttttacccttagtaacgtttacggcgatatctgtatcacggctgttttgaccaacaatcatgccttcataaacatcaacgccagcgccgatgaataattggccacgatcttcaactgattgtaaactataagttgttgatgaacccgcattgattgaaactaatgcaccgttacgacggcctggttcccagttcttaatcactggcatgtatttttcgaaggtatggttcataattccgtatccaccagtcatcgttaagaattctgttgaataaccgattaaaccacgtgaaggtgctaagaaagtcatccgtgtttggttattagcatcactttccatgttttgcatttcacccttacgttgggccattgagtcgattactgagcctgtatattggtcaggtgtgtcgatttgaaccatttcgaaaggttcgcatgtaacgccatcaatatcgcgatagataacttctggacgtgacaattgtaattcgaaaccttcacgacgcatttcttcaactaagattgaaagatgcaattccccacgacctgaaacaatccaagcgccggctttgtcggtatcttcaacacgaagtgaaacgtcagtgtgtaattggtgacgtaaacgttcttcaatcttacgcccagtaacgaaatcaccttcacggccaacaaatggtgaatcattagcagcaaatgtcatttgtaaggttggttcatcaatccgtaagattggtaaagcttcttgatggtcaactggtgtaacagtttccccaacatagatatcttccatcccagaaacagcgattaaatcgcctgctttggcttcttggatttcaacacggtctaaaccgatgaaaccaaaaatcttagttacgcggaagttcttagcagaaccgtcaagtttaagaacagaaacttgatcaccgatcttgattgtcccacgagaaacgcggccaatcccgatacggccaacatagtcgttatagtctaacattgccacttggaattgaagtggttcgtcactattatcaactggtgctgggattgtatctaagattgtgtcaaagatagggttcattgtatgggcttgtgtatctaaatctgattcaagacttgatgtcccgttgatggcacttgcgtacacaactgggaattcaagttgatcttcatcagcaccaagttcgatgaataattcaagcacttcatcaacgacttcttcaggacgagcgcctgggcggtcaattttgttaatcaccacgattggtgttaaatgttgatctaaagccttcttcaaaacaaaacgtgtttgtggcattgtgccttcaaaagcatcaacgactaataacacaccatcaaccatcttcatgatccgttccacttcaccaccgaaatcggcatgtcctggtgtatctaagatgttgatttgtttgccgttatatttaacagcagtattctttgaaagaattgtgatcccacgttctttttcgatatcatttgtatccattgcacggtcagaaatttctgcgtgaccatccaatgtatctgattgttttaacatttcgttaactaaagttgttttaccgtggtcaacgtgggcgataattgcgatattgcgaatgtcttctctttttttcaagtgtttcagcttcctctcgctagtgacttgactagtgttgtttgtctcatgtatacaagctaatattttaccataaaaaaatgggctgtgcttcatatattagcgtttttttgaaaatacgcaagtttttttcatgaaaatttaattatctttaatcatttgaaccattcataatcgtgacaatttcttgtattgcttgctttggcgcgataatcatcccttcttttcgcatcatggaaattggttgaccatcaaattgtaaaacttgaaaacctaacgtctcagctaaaacccgacctgcagcaatgtcccatggcgctaatttggagatgtaagcttgcacttgccccttcaacaaatgggcgaaagtgataccggcgctaccgtaaatccgcacacccgaacattgatacaacacctcttgcaagtgtgcttcattggtgaccagcatccgtgtattgacacagattaacccttcttgcaacggctcgtcgacagcatttttgagggcagcttcgttttcgaatattcccaactgtggaccgccccagaacaattgatcggccatcacatcataaataatcccgaatagcggctgaccgtcttcataaacgccgatcataatggcgaaatttgcccgttgcttcacgaaattcatcgtgccatcaatgggatcaataaaaaaagttagtccctgttgccaatcatcaggcacctcaccggcaccttcttcccccactaattgcgcgttcggataagccgtcttaatcttttcagctaagaaagcttgattagcacaatcgacattagtcactaaatcattaggcccagacttagtactaaccgttaatggttgtttaatttgtgtgcgggtataggcagctgcttcaaggatccacttttgcagcgaacgacttaaccgatacaatgcttcttgttccattttttcatccactttcactaattaagcgtcattttgatttgggttcgactactcctctttgcagcctgcatacaccgatatattgaatagcctgacgcttctgaaaaggccttatcaatttgtttttcttgcatcttactttgaacaaccactttgaagtcacgataagcagcttgtaaatccgcaactttcgcaccaaattcataagcttgttcaacaagattatataatttcatgacttggacaacttcagttggcgtccagtctggttctaaaggataactatagttcgtttgcataaaggctcctaaaatttgcataaatttgcgccagtttcaattctactgatgccattaatctctcacattataacgcatttttttagaagctgtcgaatccttttagaaatagcggaatcaaaaaacgacgcactcaactggtgcgtcgtcattctaaactatttattaaatatgaattggcaatcctaatgctaattcggcatcatccataatcgcttcacttaacgttggatgtggatgaatggttagagcaaggtcttctgcattcatgcctgattcaacggctaacgtcaattcagaaattaaatcactcgcgccaacgccagcaacttgagcgcccagaactgtgttgtcatccgtattcgtcactaaccgcacgaaaccttctgtatctgctaatgataaagcacggccattagctgcaaatgggaacttaaatcttttagcgttcattccttttgccttggcttctgcaaccgttaaaccggtcgttgccaattcaggatctgtataacaaacagctggcattgcgtggtaatcaaccgttaatttcttaccggcaatggcttctgcagccactttagcttcataacttgctttatgcgccaaagctgctccagcaacgatatcgccaatcgcatagatgcccttaacgttagtttggccttgttgatcaacttcaatcaaaccacgatcagccatcttaataccggcttgttcgagtcccatttcgtcggtatttggccgacgaccaacagtcaccatcacgtaatcggcaacaagttgttcttctttgccgccgacttcatatttaaccgtcacattttgatcagtttcaacagcttcttttgccattgcgccagtaatcacatcgacccctttagctttgaagttctttgtcaccaattgcaccatatctttttcgaagttaggtaaaatcgagtctgtcccttcgagaatcgtcacatgtgcacctaagttggcataggcccctgctaattcagagccgatatagccaccaccaatgaccactaattcttttggtacttccgttaagcttaaaccaccagttgaatcaataacccgtttattaaatttgaagcctttaatttcaattggacgactaccagtagcaatgattaaatttttaaaactgtacgtttgtgcactctcttctttaatcacgcgtaagctatgttcgtccactaaaaaggctgaaccgtctaacacatcaatcttgtgttttttgaacaacattgaaatgccaccagttagtttttcaacaacctcatgttgtttccagtcttgcgttttcgcaaaatccaatgttgctccagtagtcgtcacaccaaagacagatgaatctttcgcctcttgtagtcgatgaccagctgaaatcaaagccttggaaggaatacagccgacgtttaaacaaacaccgccaattgtttcacgttcaatcacagttactttttgacccatttcggccgcgcgaattgccgcaacatagcccccaggacctgaaccgatgactactgtgtctaattcaattgcaaaatcacctacaaccattttaaaatcatccttccatcaataatagctctggatcagctaataattcttttaattcgttcatcgcacgttgcgcagttccaccatcaattaaacgatgatcaaatgatagtgataatttcaagactttgccaacagccaactcaccatcagcgttgacgattggttctgtcccaattcggccaacccctaagattgcaacttcagggtagttaacaaccggtgtaaaccaaccgccaccaattgatccgatattactgattgtcattgaaccaccactcatttcagctggtttcaatttgttatccaatgctttttgcgtattttcgccaatttctttagcgatggcaaaaatactcttgctgtcggcatccttgatatttgggacatagagcccgtgatcagtatccgttgcaattccgacattaatgtagtgtttataaacaatttcgttagttgcatcatcaattgacgcgttcaaagttgggaagtcacgtaagaccgttaccaaagctttaacgatgtatggtaagaaggttaacttaatgtccttcttagccgctacatccttgaatttcttacgatgggtcatcaatttagaaacttccacttcatcgaataaagtaacgtgtggtgccgtatgcttgcttgtcaccattgctttagcaattgctttccgcgttggtgacattttttcacgtgtttcccgttctggtgtcgcagaggtgtatggtgtcgcagcaactggttgtgcagctggtgttgctggcgacgttggttgttctgctgtctctacagcaggtgctgtcgttgttgcagcgccattttgcatgaagatttgcacgtcttctttagtaatccgaccatgtttaccggtggctggcacttgactgatatcaacatcgttttcacgtgcgaattgtcgaacagatggcatagctaaaatcgtccgattttggtcactaatcgcaactactgcttgactgcttggcgccgttgttttagctggtgttgattctgacgccgtagctggtgcttgttcagcagatgttgccgttgccgaattgtgacctggagcatcaatttcgaccaatacttgaccgacagtcgccacttcgccttcaccgactaaaattttaacgactttcccactaacaggtgatgggatttcttcaactgatttatcattttgaacttctaataaagtgtcatcttcttgaatggtatcgccttctgcgaccgcccatttttgaatttcaccttcggcaatcccttcaccaatatctggtaatttaaattggtaaacaccacctgcatcggttgcagtcggtgttgcttcgggtgtagcagctggtgttgccgtacttggtgtatcgttaccttcaacacctggtgcgtcaatttcaaccagtacttggccaactgttgccacttcaccctcaccgactaaaattttaacgactttcccactaacgggtgatgggatttcttcaactgatttatcattttgaacttcaagtaagacatcatcttcttgaatcgtgtcaccttctgcgactgcccatttttgaatttcgccttctgcgatcccttcaccaatatccggtaatttaaattgatatgccatacgtctaacgtcccttctttcgttatcgactaaaagttaataacttctttaaccttattttcaatatcagttgcatttggtaaccaagttgcttcagcttgtccaaatgggaatggcgtatcaggagctgaaacacgtgcaattggagcttccaatgaaagaacagcacgttctgaaatttcagaagcaacttgtgccccaacgcctgcttgtttttgtgcttcttgaacaataacgacccgccctgttttttcgacagaggcgataattgttgcaacatctaatggtgcaattgttcgtaaatcaattacttcagctttaatattctctttagctaggttttcggccgctttaatcgcttctctcaccattgcaccgtaagtgatgattgaaacatctgtcccttcagtaaccacagctgctttatcaagcggcactgtataagattcatcaggtacttcttcgcggaacgaccggtataatttcatgtgttcaagatacaaaacaggatcgtttgaacgaatcgcagaaatcaataagcctttggcatcatatggattacttggcacaaccacgcgaatccctggaatttgcgtgatcattccttcaaagttatctgaatgtaattctggggtatgcacgccaccaccaaatggtgcacgaatcgtgattggcatgttgcgtgtgccacccatccgataacgtgtccgtgacatctggccagcaatcgaatccattgtttcgaaaacgaaaccaaagaattgaatttcaggtacagggcggaagccttctagtgctaaaccgattgataaaccaccaatcccagattcagctaacggtgtatcaaaaacgcggtcttcaccatgtttagcttgcaacccttcagttgctcggaaaaccccaccgttcttcccaacatcttccccgaaaatcaagacgttcttatcatctgcaagttctaaatccagcgcatttgtaattgcttgaatcatcgttttttgtgccatcttaattcgactcctttgcactgtactctgcgatttgttctttaatgttttgtggttggtcttcaaatgtaacattcaagaaatctgtgactttttgttttggcgcagcatccgcttcgttgatggctgctttaatgtctgttttaacttgttcgatcaattggtcttcttgatcttgtgaccaaagtcccttatcagttaagaaacgacgcattctaacgagtggatcacgtttcaaccaaatatcgtctgtttctttggtccgataacgagtcggatcatcccctgataatgtatgtggtccataacgataggttaatgtttcaattaagaccggtccgttgccagcagttgtaaattcacgcgcttctttcatcacttcataaactgctagtggatccatcccatcgacttgaatggcagaaatcccagctgcgacccctttttgagccaacgttacagcagctgtttgtttttcacgtgggaccgaaatcgcaaagccgttattttgaacaacgaaaatggctggtgctttaaaagcacccgcaaagttcaagccttcatagaaatccccctgtgaagtcccaccgtcaccggtataaacgtaaacagcattttctgattggcgcttcttcatcccaaccgcaacacccattgcttgaatgtattgcgcgccgataatgatttgtggtggcatcgccttcaaagattctggatacttgttaccgtcaatatggcctcgtgaccataggaatgcttgtgataaaggtagcccatgttgcactaattgtggcacatcccggtaaccagggaataaaaagtcgtctttagtcatcgcaaagttacttgctaattggctggcttcttgcccagcagttggtgcataaaatcctaaccggccttgacggttcaaagcagttgctcgttgatcaagcacacgcgaccaaaccatttgtttcatcagttcaaccaattggtcatcactgagatccggcatcaattccggattaacaacctggccagtctcatctaaaatttgaacggtcttaaaatcttggctctcatcgctcaataacttctcaaaattaactgcagctttattattgaccatagtatccatatctcctctttaaaaaactgttttaatgactgcttatatctgtattacttaagcatctttacaagactaatttagcatttcacatcactaaatgcaagcgttttataagctatattagtcagtttacgctttcattagtttttattacatgtgaatctaatcactagttagctaattttcacgtctgttctatatctgttataatttaatttcgttttctgttatataatagcaaataataggcacaaaaaaagagtccgccgtagcagactcatcgttaaatttaagttggggtagttctatgccaagaccggttggggtatctcagcgttgccagcatgcactaagagctcttgaaacactctgactactggtttaatttgttgactgacttgcacgcaccgttcacttacccgcaaatcatttaaatcaatcgcaaccttaatttgaccaaggttgactaacttaatcattgttagcaggattgccccgacaaccaacgttgccaagcccatgaaagcgaattgattaaccattaatactgcacaaaacgaaaccaatgcagctaccgccatcataaaagtgcttcccactctaactttaggtgtttgtgctttagcaccaatcgttgcatctagcacaacgccgtgcaccatttcagtcactacttcgcccgcttcaataacgttaacatctttgttaactgttgcgattgtaacgggtgtcttttcgctagcagccaatactaaaatatcaccgggcacaatttgatctgcaccgattaagcgtaaaaaaccatcacgcataacgctaacccgtgcttgtgaattttctaatactgcttctcttttagcagcttcgacagttgttaagccacttggccgagttgccaataaacgcattaacatcccactgcttttaatgccagtgatgttaacgtctttttttaatttcttgtgcatcgcgttcgacactccttcccttttgaggaagtcgtcgtaaaccgctagcctaatgctggcagtaaaatgacagaccacctcgaatgatcaccatcgctactacttacaggtccttcagctgttttcatcattttactcaccagactttctctactttaaatttagtcataccgctttatccgacaaaaaaagacgcacaacaattgagcgtcatccatttatcatggcgttcccaatcgttcagttttagcactatatgacgtagaaaccatgttcagctacgttagaaaaagccttcattggcagtttcagttgactcaattggcatctctcgatgtttctgagtagcagcgtttgttcatataggagcctcacctaacggaaaagcaatatatctatactcttatactacccgtttcactttagcaggtcaagcaattcattccgttttaacttgaattgtgctagaataatgaatgacgaattaatcggaggtcttaactgtgatattaatgaaagatattatccgcgagggtaacccaacacttagaaaaatagctgaacctgttacttttccactatcagatgaagatcggcaacttgctgctgacatgatggcatttttagaaaatagccaggatcctgaacttgctgaaaagtaccacttgcgcgctggcgtcggtttagctgcaccccaagtagatgtttcaaaacaaatgtctgctgtcttggtccctggaccagacgaacccatcttcaaagatgtgattatcaaccctaaaattatcagccactctgttcaaaacgcagcacttgctgaaggtgaaggttgcttatcagttgaccgcgaagtgcccggctttgtgccccgccctgaccgtattacactacgttaccaagatttagacggtgaaagccacaagattcgcttaaaaaactacccagctattgtgtgccaacacgaaatcgatcatctaaatggcatcttgttcttcgatcacatcaacaagcaagacccattcgcagcaccagatgacatgattattattgaatagaagtgcgattggttgtgcttagcaactgagcattaatacagaaatggcagttatcccgaattgtgggataactgccaattttagattaaacgggagttgttgcacccaagcgcacgttaaagaagaagtgctgattcgagttggtcaggctttgaggcttaacggtaaaggctactcgagaagcacataaaaaagcgtgattgaaatctcattagaagatttcgatcatgctttttttatgcttccgccgcttcaggcgtatcggcaaattgactgttatataaattagcgtacacaccgccggcagctaatagcgaatcgtgcgtcccttgttcaacaatttgaccatggtccatcactaaaatcaaatccgcgtcgcgaatcgttgagagtcgatgggcaatgacgaaactcgttcgcccttgcatgactttttccatggctttttgcaataaaccttctaatcgggtatccaccgaactagttgcttcgtccaagattaaaatcttaggatccgcaatcacggctcgggcaatcgtcaatagttgtttttgcccaagcgaaacgttgcttgcttcttcatcaatcgtcatttgatagccgtttggcaacgtatggataaaatgatcgacattagcggttttagccgcatcaacgacttcatactctgtcgcatcgagtttcccgaaacgaatattatcggtgattgaagcatgatataaccaagcatcttgaagtaccatcccaaattgggaacggacttgttgcttgcttaattgcttcgtgtcaaccccatcaatccgaatcgttccagatgtcacatcataaaaacgcatcaacaagttaatcatcgttgtcttcccagcaccggttggcccgacaatcgccactttatcacctgggttagcagtaaagctcaaatggcgaatcaatggtttgtctgggttatagctgaaactgacatcatcaaattcaactttaccttgaacgattgctggcaacgatgctgtttcattatcggttgcttcaactggctcatctaagatttcaaatacacgaccagttgcagcagcagctgattgaatcacaccagacaactgtgtaatctgtgagattggttggttcacttgccaaatatattgaatgaaggcttgtaaattaccaactgaaatcacaccgtgcaagacataataaccacctaacgttgccatcccggcatacgtcatgtttgtcgttaaaccaactaacggcatcatcaagccagaaacaaagactgccttaaagccatagtcagttaaccgatccgtaatttctgcaaaagcagcaattgcgcgttcttcttgtccgtaaagtttcaagacactgaagccgccataattttcctgtacaaagccgttcatttcgcccaacgtgtcttgttggcctctaaagtacggctgcgatttctgaatgacccgtcttgaaatcaataacgatgctggaatcattattaatgataagagcgccatccaaatattaatcgtaatcatcatgatcacggccgtgatgatccctaagatcgatgtcacaacttgaattaaactctgttgtaaagcgttcgtaatcgcgtccacatcgttggttacccgtgacaagatattcccttgttgttgtgaatcaaaaaaacgaacgggtagcgcattgatttgcaaatcaatgtcgcgccgtaaatcacgcatcgcccgttgaacagcccgcgtcatccaaaacgagcctaaaaacatcgtcacttgatatagcaacgcaaagctcaaaatcatcgcaatcaccttcgcgatataactaaaattaatcgcaacgtgttgtgctaaactccgactgatttcagtaatggctagtcccatgatcactggccacagtgcattagcgagcaccgaaataacagttgcggtaatcgcaagccaaaatgtcacttgatacggcccaatgtagcgcattagccgtttaagttctctaatattcttcattgagttcctcctgtgataactgtgatgccgcaatcgcacgataaatctcgttatcttttaataagtcgcggtgagtcccaataccaaccacttgaccttcgtttaagacgacaatccgatcagcattcatgatagtcccaactcgttgtgccacaatcagcactgttgcctctttggtgattgacttcaatgcacctcgtaacgccgcatccgttttataatccaatgctgaaaaactatcatcaaagatataaagcgcggggcggcggacaatcgctctggcaatcgccaaacgttgcttttgaccaccagataaattgctcccaccttcggctaaataagtttgtaagccgtctggtttttcagcgacaaaggtatctgattgtgcaattttcaaagctgtccataattcttcatcagtcgcattcggattaccataacgcaagttttccgcgattgttccggtaaataacaccgctttttgtggaataaaaccgatcttttggcgcaacgccttaagttgatagtcgcgcacatcatgaccgtcaagcttaatcgatccacgtgttacgtcaaaaaagcgtggaatcaattgaatcaacgttgacttaccactcccggtactcccaataaaggcaaccgtttcacccggatgcgcttggaacgtgacatcccgaacgactggactttcagtcggacctggataagcaaaggagacattatcaaacaccaattcaccttgtgtgtcggttgttgttaccccgtcttctttttcggtaatattaattggcgcattcagaattttttcaattcgttctgctgaaacagcggcccgtggatacatcatgaagacactggcaaataacataaatgaaaacagtacgtggaaaatatattcaataaacgcaatcaacgtcccaaccgctaagtgaccaccatcaatctgaacagccccttgccaaatgattagaacgaatacgatattaaagatgaacgaaaagcccggttgtgctaaagccaccaacgtaaacagccggatagaactatgactgtagtcatcattcacttttctaaagcgtaatttctggaattgttcccgcacaaaagcacggacaacacgaatcccagtcaagttctcacgcagattcagattaatcgcatccagatttttttgttgttccgtcgacatcggttcagaaacgcgaccaatcaagacaacccccgttagcaggattggaattgccgcaaatacaatccatgagagcgattgacttgtccgtacaatcatgaaagcactcgcgacgatcatcatcggggtcataaaccctgtccgcaacacttgggtcataaattgcatcacctggaaagcatcattagtggtccgagtaatcaaagaagacacaccaaattcgccatactcactatgggaaaactgcatggtttgtttaaaaatatcgttacgaatgtcacggacgatattggtggttaatttgctaccagtataagccaagccaattaagccaattagtccgattaaacagattccaaccatcaataacccaaattgccacacaggaccaaaggtatgttgattaattcctttatcaataatttgtcctaataacgttggtaatcccaattcgattagaataaatccaaatacgcaaataaagttccaaaatagtaatttcttatatcggatcgtatagcgccacattaatttcatcggtgcaaactccttctagacttcaaatttaatcttctacctgtgccatatctttaacatactcgattgtttcgcgattgacaataaaagcaacgtcaaaatgcaattgttcttccaaaaaccacacatcagtgactagcaaagccggataacgcggactgacggaggcaatccgccgttcgtaagccacttcattgagttgttcctcaattgcggctgccacatcctttagtgcagacgatgtttgtcggatgggcacttggtactcgaagaccatcacattattgccccaaatttcagtgggcaggttcgaaaccagtttggcttgcggtgcataaaaatccggctgactcgcttgcattttttgataagccaccgttgcaatttcatccgcaatttcttgactactgtgttgtaaaatccgcgtcgctctttgtcggcgtaaccgtttaatcaaccaggttaaaaaaagcgctaacgcgacaatgataacgactgacaaccaaattaacataacaatcccccacttctattgctcactaatatgataattataaccgaatcgaggcaaacacgctatttagagcacgtcgctcaatgtatactttaccgaaaagatatgctaaaatattcttaaatgttgagtaatcaacccctggacggttaatctttcgtttaaaactatgatgaataataaaggagttttacaattgatttataaagtacttttccaagcagacaaaacccaaagccctctacgcgaggcaactaaatcgatctatttagaagcagacagtgccgttgaagcacgccaacttgttgaagacaatactccctacaatattgaatttgtacaagaattatctggtaagcaccttgcttttgaacaagaatcagaagattttaaattaacggagttttaattaaatgaaactcgatattaagaataacgaaaccgccgttttcgccgtagggggacttggtgaaatcggtaaaaatatgtatggtgttcaattccaagacgaaattattgtgattgatgccggcattaaattccccgaagatgaactcttagggatcgattatgttatttcagactatcaataccttcaaaagaaccaacaaaagatcaaagccctcgtcattacccatgggcatgaagatcacattggtggtttaccttacttcttgcaacaagtccctaatgtacccgtctacgctggtccattggcacttgccttgattcgcggtaagttagaagaacacggccttttgcggtcaacagaattacacgaactaaacgaagataccgtccttaaattccgcaaaacaagtgttgatttcttccggactacccattcaattcctgatactttaggggttgcgattcatacacctcaaggggtaatcgttgaaactggggatttcaagtttgacttgaccccggttggtaatcaaccttcccctaatcttcaaaaaatggcacgtttaggtgaagaaggcgttttatgtttaatgtctgatagtaccaatgccgaagtaccaaactttacaaagtcagaacgtttcgtcggcacttcaatccgccatattgtggaacgcattgaaggtcgcattattttcgcaacgtttgcttctaatatttcacgggtctcacaagccactgatgctgcgattgctaacggtcgtaaaattgccgtctttggtcgcagtatggaagcagcggttgtcaacggtcgtgaactcggttatttaaatattcccgatgaagctttagttgatgccaatgaattaaattcgttgcctgccgacaaagtgatgattctatgtacaggatctcaaggtgaaccaatggctgctctaagccggatcgccaatgggactcaccgtcaaatttcaattcaacctggcgacaccgttgttttctcaagcaatccaattcctgggaatacaatgagcgttaaccacgtgattaataagctttcagaagctggtgctgaagttattcacggtaaagtgaataacattcatacgtcaggtcacggtggtcaagaagaacaaaaattaatgctccggttaatcaaaccgaagtacttcatgccttgccatggtgaataccggatgcaaaaaatccatacggaactcgctcaacaatgtggtgtggaacctgataactgcttcatccttgaaaacggtgacgtcttagcactcacttctgactcagcacgggttgctggtcactttagcgccgaagacgtttacgttgatggcaacggaattggcgatattggcaatgtcgtgctccgcgatcgtaaaatgctctcagaagaaggtttggttgttgttgtggcaactatcaatcttggtgaaaagaacattctcgctggtccagatatcctctcccgtggtttcgtctacatgcgtgaatcaggtgaattgattagcgaagcccaacgccgagttttccgaatgatcgtcaatacgtttaacgctaacgacaaggtcactgaaaaccaagtccgcgaagcaatcattgatggcttacaagacttcttgtttgaaaaaacagaacgccgcccaatgattttaccaatgatcattcaaagtacagaataataagttttgcgccaggtcaatatatgacctggcgctttttttattgtttaatgcaagtttttattgtcaacatttggtaaaaaccgctataatatacaacagattactttttctgaaaggcggcttgtccatgccctccaatccccatttttacatcattttaaaccaagttgccggtaccggtcaggcagcgagtatctggcctaaaattgaaactcaattaaaacaaaaacaaattcactatgaccttcaactctcccactacgcaggtcacacgacccaattggccttccaatttgcaaagtttaagtacacggatcaaattttattaattattggtggagacggcacgctcaatcaagccattaatggtctccagaatgctcagcgcggcgatattccgattgcttacattccttgtggatcgggtaatgacttcgcccgtggtgtcgggattagtcgtgatccattgaccgcactcgaacaaatcttgtcggccacaatgccaactgccatcgatttaggttattatcatgacacaacgaagaacgaccatggctacttcgttaacaatgtggggattggttttgatgccaacgtggtcagcaccaccaatcattcaaatcataaacgacttttaaatcgattgcacttaggctcattagcttacatcagctcattggttaaagtttttatgcaccaagatgcatttgaagtcaccgtcacggctgatcaccaaaatcattattttaaacgtggctttttagtgaccaccactaaccatccctactttggcggaggggtccccatcatgcctagcgcaacggtcgacaaccatcaacttgatttaattgtgattgaaaaattgaatccctttttcttttgctatctttttgtgatgatgttgtttggtcggcacacacgctatcaagcggtgcatcactttgaaggaaccaacttagcgattcaaacaaaaacattagaattcgggcaaatggacggtgaagaacttggtagccggacatttgatattcactacagtcttaaaagccaggcattttggctaaagaagcaagcataaataaaaggcgctgcctccaagttgggggcagcgccttttaacgtgctcttcaaatcatgttcctgtgcctagcaacacaagtcaaccgattgctttcagcaatcattcgcattgttaggctagtgctcaaaagttggccaaacttgaatgcactcatttctttagaagtaatccgagaagtatggttggtccattggaataatattctcgagattttttagtgcttgtcggttggcttggagtctttcaatctttgccaagtatgatgggcgtcgatagctcatcagcattgttgttagtgtctggatgtcgcattgaattcgttcaccgactgggcgacttgtgacctgcacttttccttgttcatcccaataaacgccaaacgtaccgttattccattcagctaatggatcggtcaattcaatgtggaatgcttgcccgtccgtttcaaacggataagccaacaagaattcacgcacatcaacaatccgcgccataaaatatggcttaatcgtctggtcaatatcaccatcttctaataagaatgaaatcggttcatcctgatattgattacccttgacatgttcaatcattgaataatgcgcgccaatgaagttccacagaccaatccgggcttcttgattaagataaatcatttctttaatatggaagacttcgttggcaatccagtataaaacatagccggtgggttgttcattttcatcataataaacaccagcaatccgttcttcttcattttcccaacgccaatattcatcccagttcagttcgttacgaatcattgcaccgtgattttttagtgcaaaccgttgatacgttttaatcacgtcttcatcgtcaatatcaaggcgttcaacgtgcccatttaccggccgttgcttaggtaattggctatcacgaatatcataagttaggtgatcagacatgatctcccaccctttcttacgataaaacggaatgctgtatggatataaatacgatatccactgcttattctcacgcatcttgttcaagccgactttaaccaagtcatgcatcaaaccatgaccggcatattccgggtaagtcccgacaccagtcaaaccacccatgttaaatacctggccatgaatgttcacgcggcaatgatagatggctaattgtgaaatcagttcgtccccattaaaccatccgattacgtcagatttttctaatacgggacgtttggcgcgttctaattcgccctcttcgtagccactatcagaaacttcctgatcggtgacttgaaaaacataccgtaataagtcattaaattgttctaaatgttcaattgtcacgggtctaatctctaaattagatcgctggtcaaccattgtttcgcctcatttttcgttagttgttttccctattatacactattttgatttcggcataaaatcgtacggtgtcaccccggtcatcccaatcattggatccacttgctgttgcgttagaacagtcggtgttaagacataactgattggcgtttcttgtattgcgtcgtcgtcttctggcactaagttcagttgttcatcaacagccgtttctggcgcacttggtggtgccggctggtcaacaattgttttggcttctgtctgccccacactggccgtcttaatggcggtgctgagttgttcaccgttaaagacactttgaatccgttcttttaacgtcgtttgccgattggccgaaagttcctgagctgctttttggaaagcactcggttcaccaatcagaatcaacaatgatttagcccgcgtgactgctgtgtacagtaagtttcgcttgagcattcgttggtattgattgaccaatggtagaatcaccatttcaaattcagaaccttgcgccttatgaatcgacgtacagtaagccaatgtaatcttgtgccactcactccgcttataggtcacttctgcactatcaaaagcaatggtgatctcgtcaaccttgtccgcactctttttagcataggtaatccccgtaatctgcccgatttcaccattaaacacattttgttccggactattgaccagatggagtactttatcgccaatgcggtagtgaacgttaccaatgctaacttgttttttgcggtcatctagctttggattcatgatattttgaatcatcgggtttaactgatcaattccggctgctcctttgtacatcggcgctagcacttgaatgtccttggtttcaaaaccacgcgctttggccttagtaacgacttgttcaatcaccgattcaatttgatacggattacattgaatgaaactgcggtctttttgcggcttcaacaaatccgctggcagttggccttgattaatttcatgcgccaacggaataatcgttgactggtcatcttgccgataaatacgttgtaattcaaccgctggaataaccttactctgcaataaatcaaagaaaacttgccctgccccgacggatggtaattgatccttatccccaaccaatacaacctgcatatgactgggcaccgcccgtagtaatgagcgaaacaagtaagtatcgaccatcgacatttcatcaataatcaataggccgccttccaattctttgttaccggaaacatctggattattttcgcggccagtgattccgagtaagcgatgaattgtactagcaggcaaacccgttgtttcactcattcgttttgcggcccgacctgttggagcggccaataaaatcggaaacggcgtgtctttgtactcattaatatctaatgacagcccgtttaattcagcgtataacgtcacgattccgttaataatcgtcgttttcccagtaccaggtcctccggttaataagaacgcccggtgagtcatcgcaagtttaatcgcctcttgttgtacgtcatcgtatgtcatcttaaaccgtttttcgaggtggcgaatttcttgatctagatcatgtttaggatagctaagttgatcgcgttcattttcaattcgcattaaatggttcgcaatttgccactccgcattaaataacccattcggataaatccgattctcatcaccaacgactttcccatcatgtgcaagtgccatcagttgttcagccaccaagttcggatcaatggcaacattgcgtgctttttccatcaactcaatactagctgccaataacggcttggcctgggtataggtatccccagcttgattggtcaactcatttaacgcttgcattaaagccccttgcacccgcacggctgaatcagcggcaaacccgagggtctccgctaaattatctgcacgtttaaagccaatcccagcaatgtcagccacgagttggtacggattttcttggataatcttcagcgtatcttcatggtaggtctgatagatgttataggccatcgagctcccaaaaccatagttgtttaagccaataataatctgttccatcccattattaatcgtcagcgtttcaacgagttgtgcttgtttcttcgcatttagccccaatggttctaacgccgtcggatcctctaatattttatcaatcgcgtcaattccaagagtatccacgattttttcggccgttttctgcccaatgcctgtgaatttttcgccagacaaataagcgactaagccggccttagtcgttggttggtccacttggtaattatcggcttgaaactgtttgccatatttaggatgagtgaccactttgccatagaaggtatatcgttcatcttctttaatgtcgccaaaactcccggtcaccacaatttctgtttcgtgccagtcaatcgtcttatgtgctactttaacgagtagaattttaaaaaaattatccgggctctcatagaaaatactctggacggttccggtgactgttggtttggtttcgtctgtttttgctatatccacaatcgccatcccttattctttttgctctttagcctgcatgaagccttcaatatcaattaactgttgtttattctttttaaaataatccggtgcatagtgcttggcttgttcgaaataaggctcactatcagcgcctaagaccagttgcgtcaagccatacttaaataatacttcaccattttgaggtgcaatggtcaatgcctttttaaggtaggtctgcgcttggtcaaaatcacccaagctcgttaaaatatcgcccactaaaagattggcgtctagttggtctggttcttgttcttgaacggtcaacgcgaacgccaatgcccgtggattctgttcgagttgatgatatgtctgcgcaagcatatactgcgcatctgttgattgtgagtcttgcaccaactgcatgaacaagggcaccgcttgttgataagcttccgcttgataatagagtgttcctaatgcgtaagtcaatgcagcttcattaggaaattgcgtcaacgctttttgcaaaagtgcttcagcttgttcaaaatctttaagcgtcgttaaaaatgtcgcaagggtaacgtaagcttcaatgtcttctgagtgatcttgtaaatattgtacgagatctttaacagcggcttcgtggtcgccagcggcccattttgctagaattgcttgcacgtgatcatctcctatatcgtatctgttgcggataattgcttgctgaggaagtgtgtatcattccacttaattagtttgaaagatgctccttgatcgtcagttgtcatcgtggtcacagatgaatttgtcacaccgccgtctttgcggacctgagccaatggcgtcttgagtaaggactgcatcatcgccaccatcgctgccccatggctgacaataataatatgatcagccggtttagcggccttcacaattgcgtcaattgcctgcgtcgtccgttcaatcacttgttcaaaggtttcccctttaatttcagttggatcatactccgctggtgcttcacgaaaggctttcacgattgtcggatattgtttttcgacttccgtaaagcgcattccttccattagaccgagattaaattcgtggagtgcatcaacaaccgtaatcggaaaatcctgccctaagtctcgttttagcgccgcagacgttacctgtgtgcgttttaacggactcgtatataaatgatcaaaatgaatgggctttaaaaatgtggctaattcttcaatttcaacgtaactactgtctaataatggtgaatcaccgcgtgcaccttgatagcggccctccaaattccattcagtcttaccgtggcggataaaatataaggttgtcatgcgttctctccttaaaataacttacttttcattatgaaagagttacgccctaaattcaagtcaatcgactaataaagcaagcatttttcctgtaaaacgccatcaaaaaaaccgctaggataaaaatactttttatcctagcggtttcatctattagttgctctaaacgtgtttcagtaggcatatttctgcggttaaccctatttgccaaattcagttaatcctcaaaatatgaacgcttacttacacactcttttatttactttctgcgacagcttgcattgcaattgcgttgacgtagttgactggttgatcgtagtttggttggaagaacatgtcaaccattgctaattgatcaatcgtcatcttcgtttgaatggccattgaaatgacgttcgctgcttgagcaatatcatacatacttgtgaatgaaccacccaatacttgacgcgtcttaggatcccacattaagttcatcaaaaccggtgtcgttgatggcatgaaatcagggcggtaatcttgttctaacgttgttgtagcgacttcaatcccacgcactttcgcgccttcaactgttaggccactccctgaataggtgcgaccaaataattcaacggcagaagttgcttgcgtgcccatgtacttttcagttggtgtttcgatgttgcggccgattaaaaggccttggcgaacagcgttggttgccaatggaatgtaatctgctttttgcgttggattgtaatgaacagctgctgaatcgccggctgcataaacatccttaacagacgtttgcatgtattcatccgtcaaaatcgcaccgttacctaacatatcaacttgccctttgaaaaggccagtatttgggcggaagccaacacataaaattgcaatgtcggctgtgtattcgttcttatcagttttaacagtgacttgatccgtccctgagaaactgaccactttttcgctaagcgcgagggttacaccgtggtcacggtaatcttgttccacgatttctgagatattagggtcgaaattcttgccgagtgcgtgtggtaatgcatcgattaatgttacttgcttatcagttgttgcataggcttctgctaattcggcaccgatgtaacctgaaccaatcacgataacactcttcacatctggggcgctcttcttcaattcattggcatgcgcccagtttttgcagagcttaacgttcggattgtcgatgccttcaattggtggaatcacaggtgatgagcccgttgtgatgatgattttatcgaatttttcggttgtttcttcttccgttactaagttcttaacgcgtaatattttttgatctaagtcagcttctaaaacagtgtgttgcatcttcatgtgagcgcctgcttgcgctaacatttctggatttgaatagaacattttctgaggatcggctacatggccgcccacccaaagggcaatcccgcatgataagaatgataaattatcgtgtgtttcataaaccgttacatcccaatcaggatgttctgccaatgttgcttgtgttgcaaatgtccctgcgtgtgtacaaccaataactgctactttcatcatgttacctcctagaaatatccaaaaaacgacggttaatcgttgagaatttgtgaaatattacgcaaccagcatgtaactatattgtacgctacttagtttcgaaaagtcaattgcctccagctattaaattaatttcacaatctaaaacgaataaccacttatgttttaaacgttatattgtgattttattctaaaaaaggtcgttgaccacttattgaacaaacccacaaaaaaagtgctgataaatataaattcatcagcacttttaacgattaaattagatatattgtaatactttcatgtcagcatcatcgttcgcagccttataagccacgtcaatcgtgccgccacctaaacattctgcgccgtcataaaagacaaccgcttgaccaggagtaatcgcacgcactggatcatcaaagacaaccgttgcagttgtgtcagatgtcatgtggacggttacgccgacgtcttgttgacggtaacggaacttagccgtcacgtggaaatctgtcccatgatcaactggtgtgatccaagaaatattacttgcatctaattgatcagcatagagtaattcattatggtagccttgaccaacatataaaatgtttttgtctaaatctttaccaacaacgaaccatggatcattggattcgccaccgccaccgattccaagaccggagcgttgaccaatcgtgtagtacattagaccgtcatgggtgcctttttcaagaccgtcgaccgtcatcatcttaccgggttgtgctggtaagtattcgcctaagaattgcttgaagttccgttcaccgatgaaacaaatcccggttgagtccttcttcttagcagttgctaagccagcctcttcagctaaccgacgcacttctgctttttgcatgtgaccgattgggaacattgatttttgtaattgatcttgagaaagagcgctcaagaaataagtttgatctttattgctatcaccgccacgcaacatgtgcgcgatgccgttatcatcgcgttcaatctgagcatagtggcccattgcgatgaagtcagcgtctaattccattgcgtaatctaagaaagccttgaatttcacttctttgttacacatgacgtctggattaggcgttctgccgtgtttgtattcgtctaagaaatattcgaacacgcggtcccaatattctttttcgaagttgacggaataataaggaatgccaattttagaagcaaccttggcaacatcctcataatcttccgttgcggtacagacaccattttcatctgtatcgtcccaatttttcatgaaaacaccaatcacatcgtatccttgttgctttaacaacaatgctgtgacagatgaatccaccccgccgctcataccaacgacgactcgtgtattactgtggtcaaccacaatatcaccatcatttcaaatagattctagttttctacgatttgaaggtcgtgaattccagtacttaccattatagcaatcttggttaatatttcaaactaaaacactcacttttcataagttaaacgtaaaaaagcagtttacctatcaaactcctggtaaaccgctcttaaaacgttatttagccttctttaattaacacttcacgtgccactaagttagcaataataaaattaaattgttcgacgttttcagcattcttttcactcttgaaaatatcgactggatgtaagccatctggagaggtgacagacatcttcaacgtctgtaactctttaccaattgtcatcttcaacttaatcgcactgttaaatggtgaattaggatctaatggccgttccatctggaagttaccattgtttgtgggcacaaagccaacatctcttaatgtgtattttttaacggcgggattgagtcgatattgcaccgtactccccaaaaccgttgctgttgtttttaataaagccatctgcctaacctccatacactgaataagtctattttagcacaagcacgtaaacgctgcctaccccttagcggcttgctttgctaaattgcgtttcacaatcttcgtgagcgcttcggcaaaagcagcgacgtcttcgctcgatgtttcgtgaccaaaactaatccggatgctttcggcaacgcgcgggctatcctcaccatacatcgcgatcaacacgtgtgagggttccaaatcgccagcagtacatgccgaaccacctgaaattgcaaagcctgctaaatcaagattcatctgcaagacataggttgaaacacctttaatccagaggttcacaacatgcccgacttgatcagctccttctgcgttcagcgcaaaatcaatgtcgttggcttttaaatcagctagtaattgctgtttgaatccagcataccgtgcttgtaggtctgctttaaccgctggggccaataattcaactgctttcgcaaaaccagctacagcgggcacattttcagtccctgcgcggcgcttcttttcttgttcaccacctaggacaaatgatggtaaatgaatcgcgtcgttgacatagagaaagccgatttgcttaggtccattgatcttgtgggctgaaactgccagtaaatcgatattgtcagcttgcacatcgatatctaataagccatacgtttgcgtagcatctgtgtggaaccaggcgtttgagtcgcggacaagttcaccaatttcgtgaattggcatatgactgccgacttcgttattgcccatcataatcgatactagaatcgtttcgggcgttaaagccgccttcaaatctgcgagatcaatcaccccttgttcgttgacgggtaagtaaatcacatcaaacccttgcgtttctaaataggccatcggttttaaaacggaatgatgttcaattgccgttgtaataatccgcttgccttctttagcacgcagtctggctgtctgaaggattgccgtgttattactttcggttgccccactcgttaagataagctcgttatctttcgcatgaatgctctgtgccaaagtatggcggctggtatccaacaccgtgtgggcttggcgcccaaaataatgggtgctcgatgcattcccgaaatcggcctgcatctgttcggtcatcgtcgcaatgacctctggggccatgggtgtcgttgccgcgttatctaaataaatatgtttcacaatttttcgcctcattttaaaaagtatctataatagtttaacatagttcgcttttaaagcacggataaacacttttcgctaccaaaaaaggctgggacaaagataccttgtcccagcctttaaaacacttaatctcagattaagcagtcattaaagctgctttttgatctgctgttaatgattcattcatccggccactcttgaaaccagctaaatcaaccgttacaaattcaaaaccagcttgttgtaatgcttggttgatttgttcgctgtgggttaagaagtcagcaatttgtgcttctgggacttcaacccgggcgattgattcgtggtaacgaacacgaaccgttgcaaaacctaaatcacgcaagaatttttcagattgcatcacttgagcaattttggcttcagttaaggctgtgttatatggaaagcgtgaagaaactgaacagctcgctactttattccagttatttaagtttaatgcctttgctaattgacggacatcaatcttataaaaaccagctgtttgaaggacactttctgcgccagcttcgtcacgggcccgtaaacctggacggaagtcgctgttatcatccatgatcatcccatctaaaacgtggtcaaagcctttttcagcagcaatttggttcaattgtgtatagaacatcttcttgctgtaataccatgtttctggtgtgttgttggcaatgtgttcgtcagataagtagttcaatgttgttgtttcgacattcgcgcccatatcatgtgccaagtcgatggctttgttaaattcttcgtctgtgaataattctgagttagcaacgactgctaagacgttttctttgccgagtgtttctaaagccatttttaaaactaatgtgctatcaatcccaccagaaaaggcaacaatcactttttccatttgttgtaaactgacagttaacattgcttttttttcagataatgtattcattgttaaagacttctttctatatcattagattaattgttttaaagctgttaattcattttgaatccgatcggcatacaccaaatcgttgttatctaaactcttgacgatcatcaagtttaaatgcgcggcactatcaacaaagtttttgaaagttgattgactagcggtttgttgcgcgtcatcaaggctaccataaagttgttctgctgttaaaagcgcttgttgcgcttcaattaaactggttgagattgtccccggttgtgaggcatgagcagcgacttcgaataagtcgaccatcatgttttgcgtttgtttaatttgttcacgcatggttgattcctccgattaaattagatgccaaagaaactccgcataaagagtgcggcacatagaccaccaacaaatggtgcaattccgggcacgataatcccgtattgccaatctgagttggctttatttttaattggtaaaagcgcgtgagcaattctaggacccatatcacgcgcaaggttcattgcgaatccggtaggaccgcccatccccatcccaattgcccaaacaagtaacccaactgcgattggtgcaatcccaggtgtcttgatttgtgtaatggcgataattgatgaaatgaaaacaaatgttgcgaaaaattcaacgaagaagttccgtggtaaattccggataccaggtgctgttgagaagatgttacgaaccgcaacaggatcgacattgccttctgatgctttaaattcatcagcgtacatgatatagacgataactgcaccgacaaccccgcccaagacttcagcaactgagtaagggataaacattgcccatgaaacgttgcctaagatacattgtgctaacaccatggctgggttaattgaaacatctccgaaaatgaataatgaaactgtaatcccaaacccccatgttgtaatggcaaataaatgacctgagccacgatactttgaacctttgaggacttcatcactgtgaaccccaaccccgaaaatgatcatgagcgctgtgcccatgaattctgctaataactgatgaatcatgaataaattcctccaaataataacgatttaatatctaaattttgatagctttaacgcgttacatcaggatagacccgactcgggcatactctgataaacagcaagataaacttgattaagtgccacgtcatgcgccttggcggcagctagacaatcgtcgaactctggactatatttttcgagatcgtcatagttcacgattttgacccgaatatcgccgaagcgcgtggctacagtgataaaatgacgtggcataatggtgcgccccatcgtctggtaacgcacaccaacagttgctgtgtgttttaagatcagataagtcatggcttgttgatcggctggatgaatcatgaccgttagcttaattgcgggccgatttttcttcatttgaattggactgaaaaaggcatcgagcgccccattgtccatcaataaatccaaaaccggcgctaaactttctgctgactggtcatcaatgttggcctccaacactaaaatctgatcggtatcggttttaacaacctgttggcttagttttttttttcgcacaacatcacgcgtaatgcattgagttgcggtgtttcccgattaccaaaaccatagccgactttaatgatcgtttgatcgtctgggattggacagaattggtcgacaatcgttttgacaatccccatcccagttggcgtgatcaattcggtctgcaagtctgggttttgtttaattggaatcgcactaccgacgcgcatttgcatcacagcggggactggtacgggcatcatgccatgcgcgactttgataaagccactcccatccgttaattcggatgaatagacttgattaactgccaataattcgagggcgacaaacgctccaacaatatcgacgattgaatcaagcgccccaacttcatgaaaatgaacatcacttgatggtaggtcatgaacgaccgcttctgattgcgcaatttctgtaaaaacttgtttggcgttcgttttaacataatcgcttaaatcactgtgatcgatgatggcttcaatgtcttttaaatgtcggacgtcatcaccatggctgtgcgtgtgtccatttgcgtgttgatgcgtgtgtgcatggccagttgcgtgtgtatgcggatgttgatgctgtgccggtgttgtttcaataaaaccttcatccttgtgcatggcttctggcaaatggacgtcaaaatcggtgccataaatactacttttagcaatccgttctgcatgtaggtggtagccagggacattcaacttagctaattctgtttcaaactgtttgaaatcaacccctaaatcgagcaaagcgccgatgaacatgtccccactaattcctgaaaatgcgtctaaataaagagttctcatttgtcatcctccgtgtcacttaaatgattgatcatacttgctgagtagcccgcaccaaagccgttatcgacattgacgacggtaatcccggacgcacaactattgagcatggtcatcagcgctgttagtccaccaaagttagtgccatagccaatactggttggcacggcaatcaaaggtttttcgatcaacccaccaaccacactggctaaggccccttccataccggcgaccacgatgacaacttgggcttggcgaatttcatccaaatgttcaaacaagcgatgaatgcccgccacaccaacatcatagattcgtttaacttgattaccgtatacttctgcagtgaccgccgcttcttcggccactgccatgtcggaagtccccgctgtgacaacggcgatatagtgatccgtggttggtagtgggtcaaccatcagcactacacattgcgccatttcatagtacattgctgtcggttccgcttcttgaatcgcagcgtacttttctggggaaactcgcgtacataaaatattttcggcatgtcgttttaacgaaccaatgatgccaatgatttggtccgccgttttaccggcgccataaatcacttccggatagccattgcgcttttgccgacttaagtcaaccttggcaaagcctaaatcatcaatggtctgcgcatgtgccagttgctttgttgcttctgtcacactgactttttggtttgcaacagcttctaaaagctgttgtagctcatttgttgtgtccaaactactcattctttctattgttatttcacaataacccctaaaccatcagggatcactgtcactttggcatctgccccttcaatctcgtaggcccgttctaacgctgcatctaaactggttgccaattccatatgcatgtctgtaattaattgtggatcaaccaaatctgacacgaaaatcacatgatgttggaccagaatccgagccaagatttgtgatgtccattgatcagggaccgtttcaagccgtggtgtattgattgcttggtctaagaattctttaggatccttaacgtcagcaatattgtgatagaacccatcaccaccatgcccgtcacgtgcaccagcgaccatgataatcacgccaccttgtttgttcgtcgcttcagcagcagtcatccctttaacggcttggtaaatattttgatcaagtggatagccaccatttgttgaaatggcgatatcacaatcgatcttgtcgacttctgataaactttcaacgaagtcacagccttttttgtgcgctgtttctaaattaccggcgaatgaaccaatgatgtgcttgtcttcatctaaaacaacgttcaagatgaattcaagcccagcttgtttagcggcataaaccatatctttgtggactgggttatgcattaaattcccggttcttgaatagtgggaattgatgaattcacctgagtggttggccataattgttttgtatgaagccacacccggtaaaacagacttccgcccgcctgagaaaccagcgaagaaatgggattcaatgaagccttcagaaatcaataagtcagcttcaacagcgactttattgataatgcaatcgccacctgatggcaattgaccgattttcacaactgagctgtcatcggttgaaacatgcatgacgatttcttcatttgcaacgatttcttcaccatatttgttaaccaattcttcgtgcgttgatggtcgatggaacccagtcgcaactaaaatccgaatccgtgcatctggtgctacagaacgaatccgtcttagtaaaatcggcgtgatgatatgtgaaggaactggtcgtgtatgatcagaactgataatcacgatattctttttccctttagccaactcttctaacttagggctatcaatgggattgtccaatgatttttcaaccgtttcggcttcgctcattggattttgatacgtagcagcttgtgaaacaagcttcccggcaaaattcgcgtctgcaatattagccgtgataattttttgatcgtaaggtaatttaatggctaccaaactataggacttcccttctcaatgctgattgaatgcttttttaaagctacgtccatagttatacagattttctgaaaaggatgcggtataatttatgaacaacatttcattattacttttaggtgtaacaaatgataacaactttatagtcttcaagacgtataatttagattaaagttatttaatgattagcagatataataaatcagcacaaagggtaggcagatgtattatggttttaacagacattgaatttttaattaactttttagaggaacgtcacgtcccagtgattaccaaaaagaagcacacatacttgacgtaccacggtttggaagaacggtatacttatattctgaaaaaaggcgtgattaaaaactcgatcattttacaagacggtcgtgaattcaatctctcttacattacccagccggatgtcatttcacttttacgggatgaaatttcaaaatatacggatcaaccgtttaacgttcgcgttgaaacagaggaagcaactttctatcagattgaccgcgtgaccttctggaactacgtgaatgccacccccgagttacagaattacgttaaaaattactatcgtaaaaaattatccgagaatatttatcgcttgcaaaaaatggtaatgaatggtaaaaacggcgggctgtgtgccttcttatacagcttaattgatctctttggtaagaaacgccgcgatggcatcctgattgacttcgtcgttactaacgaagacattgccggcttctgcggaattagctcgcgcagtagtgtcaatcgcatgctcaaccaactcaaaaaagacggcgtgattgaaaccaccgagcataaattcttaatcaaagatgtcagttacttgcttgataatatcgccaattagcgatttgttaacatatgtaaacatgattcgtgattgaaaacggctatgagacgcgtagccttaatagtcgagaacaaatcagtggaggtttttatgtatgcatattccagataattatttaagtccccaaacgtgtgccgtgcttgcagcggccgctattccagtcattggcttggcactcaagaaagttaaataccaagtcaccgaaaaaaaagaaacggtccccatgttagggatttccgcttcactatcgtttctgatgatgatgtttaacgtgccaattcctggcggtacaaccgcccatgctgttggtgcaaccctattagcgattctcattgggccgtacgccgctagtctagcggtaacgattgcactcatcatgcaggcctttttatttggtgatggtgggattctcgcactcggtgccaatattttcaacatggccattatcatgccatttgtcggctatggtctctatcgactattccaaaaagcacaccagcccaaagtgggagtcgtagttggcgcatatctcgggattaatgccgctgcattaatggccggtattgaacttggtctgcaaccactcgttgcgcataacgcagctggccaacccatgtatgccccttatccgttacacattgcaattccagccatgttgttcgctcatttattagtcgctggttgggttgaagccggctttaccctcgccgtttatcaattcatttgccgggttgcacctaacgaactgttcgttgcaccacgtcaaacagttgatccacaaaccagccgtcgcttacatcacgcgctttacagtttcatcggcctattgactatcttatcgccgattggcctattagctagtggtactgcttggggcgaatggagcgcaagcgaactcgttgcacaactcaaacatgatcacctaggtcacagtctaccaagtggtatggcccatggcttaaactttaatgccctctttagtgactacacagttgctggcgttccactatcacttggctacatcttatcagcggtaacagccgtcattgttttttatcttatcggaaaactggtgatgaatcattattcaacccaatcctaaattaccaacttggcttcaaacaacggaagctacgcccaaaacggtcgcgcaattcgaccgttttttaattcaaaatttgcgctttagtgatcgtttgctgcggcgctttaatcaaacaaaacctcaacctttaatcgcccatcaaacgcctggtattcaactgattagtttattggtgacactcatcattctcgtgttaacccatagtctacttttaatttggttgattggtttattgacgttaattcgaatttgccgcttaccaagccagcatttatggccgctttttaaacgcgtcggtgatatcagtatcattgcgattttattaattctaccgaatttttggctcggccaagtcgccacaacgcttttatttatcgtacggactgaaatcatgttattaaatattgctttctttctcgagacgatcacttggcccgcttttattgttgctttacgtcaattaagactccccagtctgctcattttgacactcgaaattagtctgaaatacagccacttgctcgcccaatttttacaagaatccctctgggcaattcggctacgctcaactggtaaaagccaccaacggcaaaatttagtcggttcactgattggccgcctctacttaagttcccgcaactacattaccgctttatacgatgcgatgattctccggggctacaccggacaagtcacccgacggacgccgctaacagtgaatcgctacgactggcgcttaatcagctgggatctagggctattttgcctattctgtttcattcggaggtaatcagatgctgaatttgcaacacattcactacgcctatacgcaaaccgacagccttaacgacatctcactaaccattcaagtaggcgaggccgtcgcgtttatggggcctaatggttccggaaaatcgacgctgtttaaattaattaacggtttgattcagcccagcgcaggccaatattattttaaagaccaacttgtcgatgcccgcttcctcaaaaagcctgcacaggcgactgccctccaccgcgcaatcggctttgtgttccaaaatagtgacgttcaattatttaacgaaacggtgcgcgccgaactcgcttttggtccagaacagatgggcttagccccagatgaagtgcaaacccgcgttgacgattgcctcgcgttgttacaaatcgaacacttagctgatcgcgtcccttatcagctttccggtggcgaaaaaaaactcgtcgctttgggcagtgtgctaacgatgaatcctgaaataattgtgctcgatgaaccattcaacggcctatcagccgcctaccaaacgctgattatccacttgctccaacaactcaatcaagccggaaaagggattttaattgcaagccacaacctggctcaagtcaaacaagtcgctaaacgggtggtcgtctttaatgaagaccatcaagtgacccatgacttaccactcgcaaaacttgaacaagaaccggaactacaacgaactttagcattactctaaagagagtgtgttgtagttactgttaatcgcagacatataactgatagcacaaatatgcggatatcaaaagcggcggatgacacaaaaataatttttgtgtcatccgccgcttttgcattttatattaatcgccttcgatttgtaactatccctctgtcgcattgaccgtgattgactgtccaatcgggaagtagttcattgctgttataaccaccagtcaccgctaaaatcgctttgacattgtcatctatgaaagcagcgtgcaaatcggcaatccgcgcttcaattggactagaattgaattggtccattaccaagacatgctgcccaaacgtcacctgataaccaagtgcactcaatcgatcattcgccggttgattagccacatatccgccaacactttgcaaactattactaggcgcgatgacccgaatctcatcaccttctgacaatcgtgtaggaatcatcttaattcacgcctctccgttaccacttcaaaacgctcacataaacaggcaattgtcggcgtaaacacctgccctgcctctgcatattcagctttaaaaaatggctcgtgaactgaacgccaataagcaagcgttcgatcactctcgccctctaaaaaggcatgttcagcgtcgacttgatcatacttaacaatcgtgcacattatcgttttcgtaattgcaaccggccggtctcgtccatctaaaataacattataatcccccacttgtgggacatgctcatcgggttcatacaacttaatcgcagaagtggtggccgttttttgaccgattattaccaatcgtgccaattcattggccatttgttctgtattcccaaatgaataaatctccgctggttgtaaattaggtgataactgttgctgttccgtgaattgttgccaataccgctgcacctctggtgtcattgacatcccctcttccattcgtaacgttgttgttagtttagcagaatttaaccatttaaccaaaaaaagaaacttacccattaggataagtttcttttgatattttatgcccaccgacgcatctttttaagcatcatcggatagcttttaattaggaaccattgtttcatcttaccggttgtttggtcggcacgaatcccagcaatccctttttcaagcatctgttcaaaagtgattgttggttctgtccactgaccatcaacgtaacacagttggcaatactgatttgacttggtgccatcttgttcactaccttggttttgtgcagtcagtggcatgccacaactttgacagaatttttccatgttggactcctttaacgtgcttttcaaaccatgttcctacgtttagcctaattagccaaacaatcggcttcgccgcttattcgtctaattttgctaatcctcagaacataaccagtttgaacacacttattttcttaacgtgctttcatcaacagtttcctgcgctttgctacacttatcaaatcatcgactatgtcgctaattcgttaagttatgcaaatgctcagaagctaaccgttgatgacgcacttcttttatttaacgtgcttttcaaaccatatgcctgtgcctagcgacacaagtcaaacgattgcttgcagcaatcattcgccttgttgggctagtgctcggaatatacccggtttgaacgcacttcttctttaacgagcttgaacgcactcattttatttaatattcttcaagaagttaagcaacattgctgctgatttttggcctgcttctacgatgaattcgtcaaacgttacgccggcttcttcgtcgccgacgtcgctcattgcgcgaatgacaacgaatggaatcttgaattgcgttgcgacttgaccaattgcagcgccttccatttcacaagagagcgcttcggggtaaatttctttgattgccttgattttatcttggctcgcaacaaattgatcaccggtgacaattaaaccaacacgtggttgtaggtcaaccgctttagcagccgcttcgatttgttgaacaatcttagcatcactttcaaatcgttggggttgttgtggtaattgacctggtaagtaaccaaaggcagttgcttctgcatcgtgataagcgacttcgcttgaaatcacgacgtcgccgacatgaaggccttcaccaatcccaccagctgaaccggtattaatcacaacatctggtttttcttcggctaataaaatcgccgtcgtcatcccagcttgcactttaccaattcctgattcaaccaacgtcactttatgaccgtacaattgacctttataaaaggtattgccagcaaccgtgtgttgttgcacatcttctaactttgttaaaagcgtccgaatttcttcttccatggcgcaaatgacactaattttcatactaactctctccattctaaaaaaacattaactttaccattctataggaaaaaaagaatcaagtaaacgataataattaagccaaaggtaatcccaatcgcccaattcaaccgtttcttcattcgtttaaccgctggtggatcgactttcttagtccgacgcgttgctgtttctggttcgtcttcagtcaccgctttaagggcttctttttgttgttcacgtgcatattcacgttctgtcctgaggcgctcttgatcgcgctgtttaaaggcggcttcttcagcctctttttgttgtcgatattcttcgcgcgtcttaggttcattcgtcatttctaccgctcctattttgcttgtaattgccagtaatacaacgccataatcgttttggcatcacagattaaatcatctgcaacggctgcttgtgcttcttctaacgtcaacttttcaacgttcaagaactcatcgtcatctagcgagcgcttatgcgtgaccggcgttagtgtatcagtgtagtataaagtcattaattcatttgaaaaaccgggtgatgaaaagaaatccgtcacgtgcacgagcttttgcgtcgtcaaacccgtttcttcattcaattcacgtagtgcgacctgatctaagtccttttcacctggatcaatcttcccagcaggaatttctaacgtttcacgttgcatgggggcgcgccattgtcgcactaaaaggatgcggttatccgccgtaatcggaataatgccaaccgccccatgatgatagacaatctcgcgacttgcggtttgtccatttggcagtgccacttgttgaacggcaagatcaatgatctggcctttgaataatgtttcttccgagaggaccttttctgtataatccatctgctaatgccacctttaccgtttaatcgctattatacgcgcatttaaaatcgtccgccatcgtcaatgctaaattcaggttcacggccgaattaaaaatccatccttaggcggatactcttttaccttaattcctgttagaatgaaggcatcaattaaatcaggagctgacaattatgtttaaaaaaataacgatttggtgcacaggcatgctcattacacttgtctcaatcccaattttggcaacatgctttgatatttatggtgattgggataatttcctctggttcagccttggtttattattagggctgatctacgttacaatcagcctcaaacggcttaaacgacaaccagaatataaaaaagatcagcatatttcaccacaaatgctgaaacactaccaagatgctggcatgagtgatgacgaaattgactttttcagacaaacgatgcaacaagccgaagcgcaaattaaggtacttgcaaccaacatgcaagctcttcctaaattacgggcaatcgatttaaatcacgatacaaccaaggtcagccaatcgctttttcgtgcgattgtgaaagatccaaagcggcttcacaatgctggcgactttttataccggcacttaccatcaatcaatgaactgactagcaaatacatcgaaattaaccatcatgaagtcaagacagccgatacctatctcgttttagataaatcggctgcggcaattgatgcgcttagtcaacagattcaacaagactacgcggatttcgtggccgaagatgtcgatgacttagacacagaagtctccgtcgctcaacaacaaatcaccccagatcacaaggaggaagactaatgtctgaaacgcccaatccaacaaacgatttaatgaatgatttattaaaagatcctttcgaccaaagtgcgccagttgtcactgaggaagcagccccccaggcagaggcctcaattatcaataagctctcccctgaacaacaagcacaggccgaacaattggcacaacaactggacgtcaacgaccaacaagccgtcttgaattacggcgctcaagcccaaaagaaactcggcgctttctcccaaacaatgctcaaccaagtccaaagccaagaaacaggcgaaattggtgacgcattaacgtcattgatgtaccgtttaaacgaagccaatcctgccgaattacgcgccgaagacagcaacgttttcaagcggatgtttggcaagattaagaagtcggtctatgaaatcactgcgaaatatcaaaaaattggcgcccaaattgatgggattgccgttaaattggacaaagaaaaaaatgcattaatgcgcgacaatgagacgcttgaaacgttgtatgcgaagaataaagcctacttcgatgcactcaatatttatattgctgctggtcagttgaagattcaagaattagaaacaacgacgattccagaagccatggaacgcgccaaaaatgacgataatcaaatggtcgtgcaagaagttaatgatctcaatcaattcaagaaccgcttggaaaaacgaacttatgatttagaattagcacggcaaatcacgttgcaacaagcaccacagattcgcttgattcaaaataccaaccaagcattagctgaaaagattcaggcttccattaacacggcgattccactctggaaaaaccaagttgccatcgccctcaccctgctccgtcaaaaagatgcggtcactgcacaacgacaagtgtctgaaacgaccaatgacctcttgaagaaaaatagtgcgatgttgaagatgtcttcaatcgaaaccgccaaagaaaatgaacgcggcgtcgttgatatcgaaaccttacagaaaacacaaaatgatcttgttgaaaccttacaagaaaccctcaagattcaacaagaaggccgcgaaaaacgccaagtggctgaaaaagaactcaaccacatggaaaatgatctgcgcgaacacttattggcctatacccaaggtcaaaccgctactaacagcggaccaaaagaagttaattaaatccacaaaaatagcgccgcccatctttttgatgagcggcgctatttttgaatagttaagctattttgcgatgtttcaacatccgccaaccggttagagccgttgcgattaaacaaatcactagcgcaaccataaaggcatcatgcatcccagcgatgaacacattcgcgtgacctggaatataccccgtcactttttgcccgtaattgcgactcattgcggcatataaaaccgtcgttgacaatgaaatcccaaagaccatcccaagattccgcgcgagggcgttaatcccaccagcaatccctagatcttcaacaccgacggaactcatgacaatcgtgttattcggtgcttggaaaatcccattcccaagcccaactaagccaacgaagaacatgaataaccagatcggtgtttgtagattcatcaacatataaccgacctgactgatcgaaatcaacactaacccgataaaggttaacatttctggcccaattcgatccgagatactcccggcaatcggtgcgaccaccacttgaacaattgggaaaatcattaaactgtaaccggcaagattaggcgctaagcctagcgcattttccagatagaatggtgaaatcacattgaagaagaagttaacgatgaaaattaagaacgcacagagtaaactcaaactaaaatcgatatttttaaacaatctaaacgataataatggctgttctacatgttgttcaatccaaacaaagatgccagcactaattaaggcaacgacaaaggccgctaaaataattggtgaggtaaatccaatttgttggccgatgaaaatgccgaggaataaactaacaattaaaactacaaaactggcaaacccagcatagtcaattttttcatgtgttttaacaatatccttcggtaaaataaaatgcccaaaaataatggttaaaattccaattggcacgttaatccagaaaatatagccccaactaaaatgcgctaagattagcccaccaatcccgggcccggcaatgctacctaacgcaacgaatgatccggttaaccccaacgctcgcccacgctctttcagtgggaaaacctcggtaataatcccattattattgctcatcgtcattgatgcccctaaagcctgaagaacgcgtgcacctaataacaatggtaagccgccattaaagccacacaacaaggaaccaatcacgaataagagggttccaattttaaacactttgaccttcccaaaagcatcgccaattttaccgaataataataataaggcacaaatcataatcagataaatcgacacaatccattccgcttgattcatcggaatctttaaatcacggctcatgactggaagtgcaatattaacgatactgccatcaagcgtcgacatgaaggtaaatagtccgacagccgtcaatattcgccaacgatttttttgaacctgcggattatccacataacttaatgccatctgtgagtcactttctttcttttaagtttactccgtctattataccgtggttttagttaaaaataaaaaacttcctcaatcaaaaataattcctgattgaggaagtttccattacttcgcttgattttttctatagcgccaagtaacaacggtaaaaccaatcacaatgctgataattggttcaataaatgaataagtcgcaaacggtacatagtcaattggattaaccccgagagccccagctatgaagatcccactaacgccccatggtactaaggcgttgactgcagaaccaccggcagaaagcgttcgacttaaatacttacgatctaatggcaatttatcatatgctgatttgaacgtttctcctgaaagaataactgacaaatattgttcaccaaccaagaagttaatcccagtcgcactcacaatggtcatcataatcagcttcccaggtgtgttaacgaactgctgaatatttgtaatcagcacttcaaccacttgatacttaatcagtaagccgccaagtgataaagcaaggataatcaaggcagctgaatttaacatacttgccatcccacctcttgaaagtagcacattcatttggcgattacccgtctttgcaacaaacccattcattagcatgtcacacaatacttttagactgtaatgctgtttacttctaaaaagtgtgataaacaaagcactaaatgaactggttaataacgacggaattgcaggtacttttagccacgcaaaaataaacaagatgatgacgggtaaaatcgcccaaaatgagatatcaaagtgcgtcatcaatacgtctgccatttgttgaatgccggccatattagctgatttcgagctactaccgaccaccacataaaagacgagcgagattagcgctgctggcagtgccgtttccgccatacttttaatatgatcataaacatcaatcccagcaattcctgatgctaaattagtggtatccgacaaaggtgagagattattccctaaaagcgcacctgatacaatggcgcccaccgtcaatgcggttgaaaaccccaatatatgcccaattcctaaaaaggcaatccccattgttgaaatggttgtaaacgaactacccacggtaatcccaatcacagtacacaataagaaaatagttggaataaagaatttaaccgataccatcttaaacccataatacataatcgttggaatggtcccgctagcaatccaagttgccacgagcacgccaatcagtaaaaagataataatcggaataatccccggtttaatcccttcaactatgccatcatgaatttcatcccaagaataaccacgaaacttgccataaaataagagcactgtaaaaaccattaagattggaatatgtggtgtcatcttgtatttaatgattaaaataccaagacaagctaacatcccgaccaaaatcacaattgattccagtaaactcgttgtatgtttctttttttcttgtgtcatttgaacaccctctaacttattcaattgtcaaaactatcaaaaacggtcagacttttaacagctgaccgtttttttgaaactatttttgttgatgtctttttggatgtcaattaaccattgatcattcttatatttactaataataaatggaatgatagtgaagataactgaaatgataacaaccaataatgattgtgacaagcttgttgtgaataaggttgcaaagacaataatcgcaatccctaaaatcaacgcaattgaaacagcccatgcaagaccgttcctttttttaccaatgcggtatggacggtctaagtctggttgatctttacgtaatttcaagacagccactgcgattaataagtaaacaattgcatacaagattgttgttgcatttgttaacgttaagaatacgccgttgacatctttcatgaaaccatataataaagcaaataatgaaatggcgattgtttgtgttaaaacaacattttttgaaacaccatattggttttgtttgtggaaacctaattttgctggtaaataaccatcacgagcaacttggatgattgtctttgaaggacctgttacccaagctgataattgtaataacacaccaatgaagaccatgaaactgaagatgttggcgatcattgttggccaaccaagaatttgacaataaattaagattggctgtgtaatatttgaaagttccattttacccattggtacaacgttagcaactaacattgcgtttactaagttcaagacaactaagccaattaatgaaacgaaaatccctttagtaaaagtttttgatgggttgtgtaaacgtggaataaagacagatgacatttcaatcccagtaaagatgaatgagataccagccatatatttcaatgatgataaaccatctttagttggaattaatttgcccattgagaagtgacccaatgtaccgccaggcatgatgccgtttttgattaatgcagcaatccccataaccgccataataacgattggaatataaacacctaaccaaacaccgatattgccgccgactttagccatatcatattttaagcttaataatgtgataatccagtagaacacaaggatacaaccaagaacaaaccagtggttattccctaaagttggattaccaaatgagttacccaataaaggtccgattgttgaagcaaccattaccatccctgggaacatttgtacccaaagtaaccatgctgcaacgaaacctaatttactacttaacgctgttttaatccaaagttgtgggccaccttcttcaggcattgcagtccctaattcaccagcaatcaaagcaattggtaatgcaaagaacaataccgcaaagattgaataactgatttgagcccagcccgttgcagctaacgtaggaatactacgaacagttgcacataaagccatcgttaaaccaataaaggttcctaaggcaattttattaacttgtttattttccatttttacttttcctccgattttatctcacaataagaaagccgcttgcgcggctttctctttttactaaacaattacttagaattatttacgatcttcgtaaattgcttctaatttttcttgcatagcttgtttgatcttaggagcaaagtaatcaaagttttcttctttgttcatgtatggtgtcataacagcggcacgaagaacagttactttaccagcttcttcccagccttcttcagtaacgcctaagttattaacaaacttgaatgggctgttaccataatcaggaatagcgaagtcagtatgtgatgttaggtattcgttaccatagatgctaccagttacatatgaagcttggttgtagaattcatggtttaattcgttcatttctacaaggttgttgttaccttcttcttggaagacatagtcaaccatgttgaagtcaggatctgttaaaggatgaacttcaattgtcttgtcgccaactttaaattctagaccacttaagaagttgtagaaacgacgaacaccttcgattgaagcaccaactaatttaccataaccagtaacgttcaatggtaatgttttatgtgcagcccatactgatgcagcagttgcgccagcttttgaaccttcaagaatatatgcacccaataatgcaggaatatctgcacctttttcaaagacgtatgttgcgaagtatgaaatcacgtcgcgcatgcgaatatcttggatggcaatcccaccagctgaataaggaatgtaacccatcttatgtggatcaattgtaactgattctgcttctgggaatgcagcatatgcattgtaagtatgttctgaaacaaggttttcttcttcagtgaagacattgtattcagcaaatttgctttgtaggtctttgtatgaaattaatttgttatcttcatcaagtaagatagcacgaccataaccaccgtaagcagcatcaacgtggaagtagaagtagatgccttctttaacaagtttgttacgtaattcagcaatttcgttgatgccgtcaacagcaccttcttcagttgagccaacaacgccgacaaccccaagaattggtgtttctgtgcttgctaattcacgaacgattttttctaattcattgatatccatacggtaatttgaatcaactggtactgggattacttgatccaaaccgataccgataatatcagcggcttttaaccatgaataatgttttgtttgtggaactaaccatttacctaacttgtcaagatctttaccaccacgagctgatttagctttgatttcatcaatcttgtcgccgttagcttcaactaagtccatgatttctttagttgacatgtttgataattcccagtctgtcttgcctgctacaatagtaggatcaacagccttcattgcaaatggaagtgacttgatgttacgtgcataccataaaccttccaagttagctaatgaaccatcagctacgatgtggccccaaccatttgtgtaacccatcaatgttgcaaattctaaaccaacttcttcttccatttgtgaagttgctggtgatgattcatacgcaacgttattaccattccataacattgcatagttatatgccaaaatggctggcattaatgtttctgagttcatatgaccccagtaacgaccagcattatgtcaaggaactgattgtgaacgtaaaacgtgctgaaagttcgtctaaaacgtctttcatgttgttaaccgttccttggaattcaggtgatgtttgttgttcagctgaaatcattggtttgtcttgtggcatgtagttttgacgccatccaagatgttcgtcaaccaacttacctaacaaatctttgtaaagttgaccattttcagctttatcaccgataaatagagcagataaatctgtatcttttgcactaaaactattgttactcataacaaaaaatcctcctaaattgtagatatagtataaccccaatcaatagaatacgctcattgtccataaaagcaaacatatgaaagcgattccgattttttagagtacgaaaaatagccgtcaaacaacgtttgacggctacctttgcagttgtattttggggttatactatatgatctacattcacgaagaacccagtaacattcagtatagatacaaaagccttcatttaatttttggaacgtctctagtcagtaacacgtgctaagaagtaattcttcttcccacggcgaataatcacaaacttgccatcaaagctagtcatcgggtcaatcatcgcatcagtttcttggatacggtcaccgttaattgtaatggcaccattttgaacatcttcacgtgcttgacgttttgaagattcaatacctgtatccactaagaagtcaacaatgtttttagcttctttactaatttcaactgatggtgctttaccaaaagcttgttctgcttcaacaacatctaaagctttgatattaccttcaaaaagtaattcagtaatatgttccgcttcatctaatgcttcttgaccgtgaacaaaacgtgtcacttcttgtgctaaacgtttttgtgcttcacgtttttcaggttctgttgcaactttttgtgccaattcttcaatttcgtcttcttctaagaatgtgaagaatttaaggtatttaataacatcacgatcatcttgatttacccagaattggtagaattcgtatggtgaagtcttttcagcgtcaagccagattgcaccacctgctgtcttaccaaacttagttccgtcagctttcaacattaatggaattgttaaaccgtatacgggttcgtcgctaccttcaagtttatgaatcatatcaatccctgaagtaatattgccccattgatcagccccaccaatttgcagttggatgttatgttcatcatgtaagtgtttgaaatcaattgattgtagaatttggtatgtgaattcagtaaatgaaatccccacttccaaacgactagcaacaatatctttagctaacattgtattgatgttgaaattcttaccgtaatctcttaaaaagtccaacaatgagatttttgataaccaatcgtagttattaacaaaagtaacattggcatctttaccaaataatttccgcatttggtttgataaagcttcaacatttttttgaaccttttccattgtttgtaactggcgttctgaattacgaccacttggatcaccaattgatcctgtcccaccaccgattaagatgtatgggtgatgtccagctaattggaatcgtttcatcatcatgaatggaatcaaatgaccgatgtgtaaactatcaccagttggatcagccccacagtataaagaaatcttgttgttttctactaattcacgcaatccttcagcatctgtttgttggttaatcgcatcacgccatgttaattcatcaataatattttttctcatcaaaatttcctcctaaattaaaaaagtcccagtaatctttaataaaataaagattactgggacgaaatgtcatttttccgcggtaccacccgtgttatattttgaaagtgcactttcaaaatatcactctagattttaacgtaaattcaacgtacgatttgataaaacaaaaagtgtaattcgacttagaaacatatgtcaggtctcaccaaatcccgactctctgtaatagtggttactaattctactgcgcttttcaatcgctttattaacttatgtgcttatcatagttcacatgataaatgaagtcaacacttttatgctatttttttataaacatgaacgattttattctaatttaaatttaattaaattagaatagtcgtatttaattcctctaaattaaagttttacaacattcgcagcttgtggtccacgtgtgccttcaacgatgtcgaattcgaccgcttggccttcttctaatgacttgaagccttcgtcttggattgcactgaaatgtacaaagatatcgtcttgaccttctgctgagataaagccgaaacctttttcattgttaaaccattttactgttcctttttccatgatgttactcctttaaatacacaattattatctagccaccagaatcggtcatctaaacaagtcaattatacgcgattttgtaaccgcatgcaagcgtaaaataaattaattgagtttatatcgggtccgccgttgatattgttcgccaggatgcaaaacaatattaccaaactcggtatgatggatggcatctggcatcatttgggcttcaatcgccactgcttggtggggttgaattgcctgatttgttaagtttggttcgtccccgaagccattggcggtataaataacgattgcattcccttctgtatcaattgtgatcgagcggccactttcgggatcgcgtaaaatcgcatccgctttacccggcgtttgattcaacaggaatggatgatcaaaaccaccgaccaatttagtttgcgtattttcactatcaaaagcggcttgcaaagctcgcggttgacgtaaatcaaagacagagcccgcaactgggactaattccccggttggtaagccgtctggttgaatggcaccaaaacggtcactatcgatttgcaatgtgtgttggccaacaaattgatcaaagtcccccgtcaaattcagatagacatggcatgttgggttaaacaacgtggttttatcagtcgttgcttgatagtcaattagccattcattggcctcatttagcgtatacgtcgtggtcaccgctaaattaccggggaatccattttcaccatctggactcgttaacatgaaaacgacactaatcgcatcatctttttcaaccactgatgattgccagatttgcgattcaaaactattggggccaccatgattcgtgttggcgccattattaatcggtgcttgataatcatgaccatcgagtgtaaaagcaccttgaccgatgcgaccagctacgcgtcccactgtcgcaccaaaataagcttgttgctttacaaaatccgctagggtgtcatagccaatcacaacattggccatctgaccactttgatccggcatcaccaagtgagtaatcgttgcgccgtattctgtcacggctaattgatacccctgacgattctctagccaatactgccaaaccgtttgaccatttatttcgccaaatgcttctcgccaatacttcatgaatgttcctccttataggttaaacatgttgcgtaaatttaataaatgctgcctgaccttgttcgttgcatttgaaaacaccagcgtcttctagaacgcgcatgaacactttgccgacttcagtccgcactaattccgttacgttatctgatgtaatcgatgtgttagcggctttaatcgtatctgcccattcttgatggtaagcggccatctggtttggttgatcgcagagatagtgttcaacctcagccatttcatctttgagtcgtggtggcaaaattgctaagcccatcacttcgattaaaccaatattttcttttttaatatgttgcacatctgcatgtggatgataaattccatctggatgttctgcagacgtttgattgtcgcgtagtaccaaatcaatttcgaattgaccgtctcgcatccgcgcaatcggcgtaatcgtatgatgtggtgtgccgtcttctgagtgggctaagatttggacacttggatcgctgtaattttgccaactagttaaaatttgtgcagcgagtgtttccaaatgcgttgcattcgcactcgtcaaacgaatgactgacattggccacttcacaattcccgcctgaatatcattatacccgttaaaatgtagtggtgtctcgattggcgccttagccattggaaaatcgtgacgacccccttgataatgttcatgggttaagatcgaaccaccgacaatcggtaaatcagcgttactcccagcgaaatagccggggaactgcttcacaatctgtaataaatttttgaaggtcgtttcattaatcaccattggttcatgttgaccatcaaggaaaatcgaatgctcattaaaataagcatatggtgaatattggaagccccaagtctgacctgccaatttaaaacgaatgatgcgatgattacgccgtgctgggaaatctaaacgccccgtatacccctcattttccagacataattgacatttggggtagccggtttgtttcatcgttttggctaacgcaatttgtttcgggtccttttccggcttcgataaattaatcgtgatttctaagtcgccatattgcgtcggcacttgataagcgatatttttcgcgattgcggccactttaacgtagtcgttggcccgacttaattcataaaagtcggcaagtgcttgttggggatcactctcgtattgatgccaaaaatggcggttcaccgcacttggtaatggcgtcaccaaatccatcaacttcgcccctaaaatatcttgttctgccgctaaattctcaatccggctattcgcaactgcaagacgcaacaacgcgtcctttaatccgatgagactttgatcagtcaccgcaacgttactgtcctcttcaccaacaaggtctaagacgagattaaataagtactgttggtcttctgctttataaagtgtgtcttgaaagataatcactttttcaataaatgtttgaatcaattctcttgcttgcatatgctttcctctaccgatctgcgtatcctgctggatgatttaaatgccaattccaggcagtttcaataattgctttcatattgtcatactgtggcgtccaacctaagacttcgcgtgctttgtcacttgcggcaatcattatataaattaattaaatgtaaatagctgaaattaacggtattgacaaaaaaatatttttaataagttttaaccctattaatatttttttattgaaattcgccaagtttgtgatgtttttatttattaaatgaccttttaatcgcgatgcagtttacagcttgtagctttcagccgtttttatagttcaaataataattatattgataagaaaatatttatttaaagctatcgttttctactaatggtttaattccttaaaattgatgcaactttttttgaatagtgctaataattgtcgctaatccattggctaaaccagtcataatgaggtaaataatcaataatcgatgtactttttgaacaaaaaaagaccgctatctaaagtgatagcgatccttttttaatccataatgcccgtggcaggattcgaacctgtacttggttacccaaacagcgacctgaacgctgcgcgtctgccaattccgccacacgggcgattgtgctacaagactattgtaccagtgttacagagccctgccaatacccatttattaatatttcgcttataataatagttgataagggagggattcagatgcaagtcatcacaaattcaaccgttcgtgcggtcctgcaggcacggcctgccatcagtcataaaggcgattttggccgcgtcttaatcattggtggtagtcagcaatacggcggtgctgcgattatgagtgcctgtgcggctgtttatgctggtgctggattagtttccgttgctagtgacttaagtgttctcagcggactgcacgcgcgcttaccagaagccatgttcattgattatcaacaacccttcgtgcagtggtcgtctgcagtccaggctgctgatgtcgttgttgtcggacctggtcttggcattacttcgtttgccgttgaactgctgagaaaaatcttacaaaccatccaaccaacacaaacactgattatcgatggttcagcactatcaatcatcgcacatgaaaaactgacgatcccgaatacgcaactcattttaaccccgcatcaaatggaatgggcgcgcctcagcggtgttgcaatcgagcagcaaacggttgctgctaatcaagccgcactcgctgcttatccaaacgcgactttagtgcttaaaaaacatcacactgaggtctatcatcagcaacaggttcagcaactaaccatcggtgggccttccatggcaactggcggtagcggcgatacactgactggtattattgccgcattctgtggtcaatttggcacccactatcagacgatttgtgccgctgtttatacccacagtgcgattgctgatgaactcgccaaaacccaatacgtcacacttcctagccaagtgattcagaccttaccacactatatggctaaaatgattcatcaatcttaaaaaaacagcagtccttttgaaagggctgctgtttattaattcgctttaagtaatgcaagttctgcatctgtcaacgcacggtattggccacggtctaaatcatctggcaatgccagtggtcccatcttaagccgttctagcgtcaagacttccttgccgaccgcatgaaacatccgcttcacttgatggaatttaccttcatgaatctcaacggtaatctgactttcttgttgcgcctcatcaacactcagaatttcaagctgtgctggttgtgcagtaaaatcactcaacacgagccccgcttcaaaccgcgcttgatcctctgccgtgacaatcccggcaatcgtggcacgataaactttactgacatgttttttaggactcaacaaggcatggcttaaatcgccatcgttcgtcaacaacaataaaccagtcgtgtctttatccaatcgccccactggaaacagatcatcccgcaagtccgctggtgccaataaatcaagcactgttttctggggatcagtcgtcgccgaaatcacacccgccggtttgttcatcagccaataaaaataggtttgataacgcacgggttcgtcgtcaacatagacaacggtcgcctcgttcactttgaacttcgcatctttgaccacagtcccatcaacgcgcacgcgtcccgctttaaaaagtacctttaattctttgcgtgaagccacattcatatgacttaaaaagcgatcaattctcatttgattctcaactttcttctaaaccgatccaagttactcccaatgacatagtccgctaagcgcgatttaagcaccaatgcggcgtaaacagccacacctaggccaacgctaatcattaagactagaacgctctgaagacggctgtacgggttaaagacaaggtataaccccttgactgcccccgccgttaccaaatacatcaccaatgagaagcctaaaacgccgattaagcgccgaatggttttgcgtaatgcaaagtgataatagcgatgcagtgctgcaatcattaaaaccgaacttgtcgcaaaggctaagccggtcgatactagcgggccatagacacggaaaaaataaatcgctgggtactgcgccacaattttgacgatgaatccgatgaataagtaaaacaatgccaagcggttctgatagaggccttgtaagacagcgcctaaaaccgtaaagaggccgagcataatagaaatgtaagatgaaaattgtaagacactaatcccaagcgtatcatgcgcgtagaataacgtgtaaagcggaccggcaaccgccgccatcccaaatgccgctggaatcatcactaagttgaataattgcaaagtactgccgatttgatgttgcaattctttttgattgccccgcacatgcgcagctgacatcaatggaatcgccgtgaccgccatggcagcagcgagtgaaacggtgattgaaatcagtttattcgcattagctgcaaataaagcatacaagttatacaactgatgatcactggcaaccacgaaatcatgcatcatcggattaaacgtgtattggtcgatgatatagaccaagttgacacttgcgtcgattacgatgaatggaattgattggcgcacaatcccttttaacaagtcagtcgttgacacttctaattcgttgttactattggccactaactctgaaatgcgaccgcgttgtttcaaataatagaaaatcagtaataacaagccggcagcagccccaatgaatgcggcaaatgtcgcctgcgtcacagcatccacgtagctgcctttaaacacttgcataatcataaaagcggtcacggtcatgtacagcacgcgggctgcttgttcaataaattgcgaaatcgcagacggcgccatttcggcatagccttggaaaaagccccgcataatactgagcaatggaataatcaatagcggccagcttaatgaccggaagaccggtaccatccgcggatcacccgctgctagaacgggcgctaacgcaaagagtgcgagcgctgataaaacacccattgccaacattaaaatcagcgactttctgaaaagacgctgaccaatgccatactcattcatttcgttatagcgtgcaatttgtttcgatagcgcccctggaatcccagccgtcgagatcactaaaaagacactataaatttggtatccttttgcaaataatgtgttggcttgtaagaaattcgcgccaaaccagattggccacggaattacatagacggcgcccagaattcgcgagaaaatactcccagcggtcatccaagcggagccccgtaacatcttactttgtgaagatctatccgtcgcctttgtttcaggtgaattggtcatttcccataactcccttattaaacgtcaaaaagcatcttcctaccattttagaggattgccccaagccttgcaattcctttaacaaaactttatgaaaaagagtgcttctgatgacggttagcaactgagcattaatacaaaattcccaataatccaggttttaagattattgggaattttagattaagcggaagttgttgtcatcagaagcacgtttcaataagagtgctattagcgcttgcccagattttgagcactaaactaaaaacgggaattatggcgtactcggccatgattcccgttttgtagttaggcgcagaaatctagcgccaatagcacgtttcaaaaaaagagccccgccttcgcggagctctctgccatctcattatttagcttgtttactttgttgaatcaaataccacgtcaacagaatgctgacaaaaaccatgataccgccaaagattggtgtactgtctaagccccaagctgccgatgcttgcccgccaactaatgagcctatcgtaatcccgatattaaaggctgagatattcaaagccgaagccaatggaatatcatttggcctgattttttcagccaactgcacaatgtataattggagccctggaacgttcatgaaggcgaaaaagcccatcaataaaacgttaattaaaccgaaccaatgggcatttaacgttaacctgaatagcaacaaggtcactaacaagccaacaaacattttcaatagcgccatcaacggttggtgatttgaccatttgccacccaacgtatttccaaaagccaccatcagaccataaataattaagatgatcacaacggcccttggtgaccaacccatttttgattctaaaatcggcgttacaggcgaagactggcgcaaaagcgaccgtcaagttaccaatgataaagacaaccataatccccaacaataaatttttccgtggccaacgacttgttaaaatcgccaaaatcggtgccccaatcgtaattcccaaagcatacatcgatacggttagtcctgcttgactcatcgtaatcccaaaatccttaatcatcaatggcattaagccgacactgatgaattctgtcgaaccaatcgcaaaagcactgattgccaatgctagtaatgtgaggttcgcccgttgtttactactcatactgccacactcctattagactttttttactgatgtactatattattcaataggagcgtgattttcacaatcacgcactttttagtcagtaggttactgaaaagtaataattgagtcttatcacaatgaaaaggtgaatcaaaattagaaatgaatgagaaaacatataacattggcgttgaagctacgatggaaattatcggcggtaaatggaaacccgttattctttgtcatttgcgcaaccaaccacggcgatcaagcgagctcttacaacgcatcccaaagatttcccaaaaggtgctcactgcacaattacgcgaactcgaaaacgatggcatcatcaatcgtaaaatttatcaagaaattccgccccgcgttgaatacagcctctctgaatacggtcagtcactcaataaaatcttaaatctcctctgtttatggggcgaagataacattgatcgccgccaaacagcgggtgaatcaatccaatcgaataaaaaaaggcagccaactaggctgcctttttgcttgtcatgatttttgccgaccaaatttcacgaaataaataaccaccatgatcattaagaaaattaaaccaacaatgattgaaatccgcgtttccggattaatgaacatgaagattaaggtgatggctagcatcgccaatgtaatgtagttcgaataaggtgaccaaggcatcttaaatggatgttgtgccatcttgtcagcgtgttgctttctaaaggcaatttggctgattaaaatgacgaaccatggcaccatccctggtaagacacttgagctatacacgagcacgaagacattgccggctttaggataaacgagtggtaaaatggcgtttaaaatcaccccaattaaaatccctaatgaaatcgcaccgaccgcataaaatgggacaccgtggcggtttaattttaagaatcgttttggtaactgcccattattggccaacgtaaacgtcattcgactggcactgtaaatccctgagttagcacccgataaggctgctgtaatcactacgaagttaatgattgatgctgcagcggtaatcccaattttagcaaaggtttgcacaaacggtgacccgacctgactcaattcgttccaaggataaatactcaagatcacgaaaatcgccccaatatagaaaatcaaaatccgtgcaaccgttgattgaattgctttgaccaatgttgattgtggattttcagcctcgccagccgtaatcccaatcaattcaatcccttggtatgatgccaagacaattgccaaggcaaagatgaagcctttaaagccccccgtaaagaagccgtgcgtccataaattactgatgccgactggatgcatatggttcccaatcccaaaaacaatgagacccaggcctgccacaatcatcagaataatcgtgacgactttaatcagcgcaaaccaaaattccaattcaccaaacatgctgactgaaattaagttagccgcacataagaacgtaatcgcgaccagtcccggtacccagcccggcaagttcggccaccagaattctaagtaaccgccgatggcaatcatttcactcatccccacgacaacgaattggaagacgttgctccacgctgttaagtaaccaaaaatcggatgcatatattccgttgcaaacttggcaaaggaccccgtatctggatcaacatacagcatttctccaagtgcacgcataatgagatacagcaataaaccagcaatcccatacgcaatcagcacagacggccccgtccatttaattgtcgtgttggcccccataaaaagcccaaccccaattgtcccgccaagtgcaatcatctgcatctgacgggcagttaaatttcgtttcatagtcctcaaacccctctattttagcatcatcattattggttaaccccagaatctaaatttacttatcatcgtataataaaaaacacccaaaagcaatagtcgctctcatctttttatcatcttaaaagtgctttagaataacccttatattaattgaaggataattaggcccctaaatattaattttaaataagaaaaagcagttactgcgagaaacagtaactgcttttttgaaacatgctttttggttgcaacaacttccgcttaatctaaaatttcaaataatcctaaaacctggattatttgaaattttttattaatgctcagttgctaaccgcaaccaaacgcactcttgtctgaaacgtgcttttcaagctaactttctgcgcttatcccagtgaatcaaacaatcgactacgtcgcttattcgcttccctctgataatgctcaaaagttgaccgagcttgaacccactctttttgaaacgcactctaattggcgacgatattgaccaatttatttggaatggcaatcactttgcgcaccgtcttgtcagcaatgaattcagctactttttcatttgccttagccatcgcttctaattcttccttcggtgtgtctttagctactgttactttggcctttaacttaccgttaacttggaagatcacttctacttcgttagcgaccaatgctgctgggtcaaatgttggccagtccacgtaactgattgagtcatcatggccaagcattgcccataattcttccatcatgtgtggtgcaattggcgctaataacttcacgaagccttcagcgtattcacgtggtagtgtgtcaactttataagcatcattgatgaagaccatcaattgtgaaatggccacgttaaagtgcatgctttcgaagtcttctgtcactttcttaacagtttcgttgtaactcttcttcaattgttcatcattttcagcgacaatcttgcttgatagttggtcgttttcgtcggtatcttcttctgtgtatagacgccatacccggtccaagaatttacgcgcgccggctaagcccttttcactccatgaaatggaagcatctaatgggcccatgaacatttcgtataaacgtaatgtatcagcgccaaagcgatcgacaacatcatcagggttaacaacgttcccttttgatttcgacattttttcgtggttatcgcctaaaatcataccttggttatataggtgttggaatggttccttcgttggcacgaccccgatatcatacaagaacttgtgccagaaacgaacatataataaatgaagcacagcatgttccgcaccaccgatgtacatatcaactggtaaccagtctttcaacttatcaaagtcagccaatttatcagggttcttaggatcgatataacgaaggtaataccatgagctaccagcccattgtggcattgtattcgtttcacgacggcctttgcgcccattttcgtcggttacgtttaaccagtccgctaagttcgcaagtggactttcaccagtccctgaaggcttgatatcacttgttaatggtaattcaagtggtaattgagcttctggcaccactgatgttgtgccatcttcccaatgaataattggaatcggttcaccccagtagcgttgacgtgagaataaccagtcacgcaacttgtagctcacttgttcatgaccagcattatgcgctactaaccaatcaatcatcttgtcgattgctgcttgtttgtctaaaccatcaaggaaatctgaattaatcatcacaccaggttctgtgtgaacagcttcttcaggattaccaccagccacaactggtttcaatggtaaaccaaatttcttcgcaaattcccaatcacgagggtcatgtgcagggacagccatcacagcaccagtcccgtatgaggctagaacgtaatctgaaatccagattggtaaccgttcgccattgactggattaatggcgtaagcacctgtaaaggcccctgttttatctttcgccaaatcagtccgttcaagatcactcttgtgttcgatttcttttaaataagcatcaacagctgctttttgttcaggcgttgtgatatcggccactaatttatgttctggggccatcacgatatagctgacaccaaacattgtgtcggcacgcgtggtgaagacatcaatctgagcgtcgtggttttcaacagcaaatgatacttcagcgccttttgagcggccaatccagttgcgttgcatatccttgacactttcaggccaatcaactaggtctaagtcgtcgattaaacgatcagcataagccgtaatcttcaacatccattgacgcattggtttccggtaaacaggatagccaccgcgttctgttttgccgtcaatgacttcttcgtttgcgacaacggtccctaaatcagggctccagttaacagccacttcagcttcataagctaagcccttttcgtacattttttcaaaaatccattgggtccatttgtagaaatcaggatccgttgtattcacttcacgatcccaatcgtatgagaagcctaatgaattgatttggcgtttgaacgtattaatattggtttgcgtgaaatcagcaggattgttcccagtatccaacgcatattgttcagcaggtaagccgaatgcatcccaacccattgggtgcaacacgttgaagccttgcatccgtttcatccgggccaagatatcagttgccgtataaccttcaggatggccaacgtgtaagccttgacctgacggatatgggaacatatctaatgcatagaaatttttcttatttttatcttctgttgttttgaacgatttgtgtgattgccagtaagcttgccacttttgttcaactgcgcgatgatcgtaagtcatatcaaacactccttttttttacgtgctttcaaaagcatggacacttttgacgcactcttttttaattcacttaacgccaataaaaaagtcctatggtataaataccataggacgaattgaccgcgatgccacctaagttctgtccaatctatattggacaactctctggccttaacgcggcagacgtttctatctactatcagttcaatagaaaactcaaaggcgagttcgttatgttaaacgacgtgttcacactaaccacacgctctctaaacgcttaacgataactactaatccttctcaacgttaaataattgttcttagcataccaaactcttacttcaatttcaagacttggccgactaagattaaatcagaatgtaaattgttcgctgattttaattgtgcgatactggtattatttttttgtgcgattgaccaaagactatcgcctgatttaaccgtataagtcttcccagaattcgtgttaggcgtcgttggcgttgtagcgccagccattaattttaagacttgacctgggtagataaagttattcttaatattattagccttgattaattgcgccatcgaaataccgttacggctagcaattccccagacagaatcgccggccttaaccgtataagtcttcccagaagcttgccctggatttgtactatttgtattattgttgtttgaattaccagttgttgcaccttggctaaccactaatttttgaccaggatagataaagttgttccggatattattccatttaaccaagtcagccattgagatgccgtaacggtttgaaattgcccagacagaatcccctgatttaaccgtatacgtcttgtttgaagtctgattaccgttattgctgtttgaattattgttatttgtattgccagttgcggtttttgaaactgttagaacatcgccagggtgaatcatattattcttgatgttattccaactaattaaatcgttcattgaaatcccatatttgttggcaatcgcccaaacagagtcgccggctttaacggtatacttatcaccattagctggtgttgttggattcgttggtgttgtagggtctgttgggtttgtcgtcccaccattgttgttgccagctgcactacttgaaacaatcaagacttggcctgggtgaatcatattgttcttgatgttattccagctaatcaagtcattcattgaaatcccataccgattagcaatcccccaaacagaatcgccggctctaacggtgtattttgtcccattttcaggtgtcgttggagtcgttggcgtggttggagtcgttgttcccccattattgttaccagtattggtccctggcgtgtcatattgcgttaaattgtattgttgaatcaaacggttcaaacttgacgcataattggttgctgttgcataacgtccttgtaagtattgtgtggcttgttgatagctacttgtatggctcttaaatgccccttgataataaggcgttgcaccaaatgaagtattccgtagcacatgcacataatcttgtaacgattggtagtatgaaggatattttctaaatgcagcttggatctgatacatgttcccatgaccatcatcttcccaagtccacatataaacagaactaccattgtaagtcccttttaccccaaacaagttataattaggggcagaacctaaaccactgctcccaaatcctgattctaatgatgcttgggcaatcataacagaggcgtacaaatcgttatcacccgctaattgttgagctgaactagcaattgaattgatgaaattttgtgcgcttgaattagctgctgccataacaacgccagcggttgcgatattggcactcgtactttgcactccagaaattggttgcgcttgagatggtgccggttgtggcgtagccacctttgtcgcttcattttcagtcaattgaggttttacaacaggttgttgtgttgattgggattcagttgtcgttgtgcttgaactagttgttgatgatgttgcactacttgctgtattagctgttgtagcttggtcatcattgtttgcactatttaacacatcttcagtggctgctttggcccgattcgaaaaactaggtgcaattgctgaacccatcaagacggttgcccctgcaaaagtcgtcacattacgaactttcttaattctaatttcccgcttctgcttatgtaagcttaccttttgagctgcaattcgctgttttctagtctctttcaattctaacgcctccgaatttccattattattgtctgtggcacaattaacttgagcttcacctgaactttattataatattaataaatggggaaaacaatcctatcacgcaactacttttattagttgtcttatgcttaataattattgtatcatttaataatcttctttgtctttaattacagcttattttgaaaggatttcttaaaaatgaccaaacgattttcggctagtttattcattcttggcacaatcagttttctaatcattttaatcagcgttgtgcaccatgccacttgggttatacattttgatacccttatcagaactggcatccggtcgctttcctccccattgatggatactgtaagcattgcgattacgtcgatcggcaatccctatagtataatgactttgaccaccattgtaacgcttggtttgctgggctttaaacagtggtcagcagctagctttttagtcattaacatggtccttttttcaacgcttaaccactttattaagatgagcgtccaacgaccacggcccccatttcaccatcttgtctacgcaggcggctacagcttccctagcggtcatgcttcgggggcacttctttttttcggaactttaagcatcctagtttactacttaattcgtcaacgcgtttggcgaaaaatagcgattggcacctgtttaatattggcactatgcatcggccttagtcggatttacgtacttgttcattatccgagtgatgtcttagctggctttttattagcaacggcgtgtctcggcggttcatggtactgttttattcattttaaattattgcatctgaaggagtcctaacacatgatacttgatcatcccactaaatttgcacattttctattagaccaggcaattcggcccggcgatgtcgtaattgatgccaccgtggggcatggcgatgataccttatttttagcagaacgcgttgctgattttggtcaggtttacggtttcgaaattcaaaaagaagccatcgaaacctgcgcggatcgtcttacaaaagcaaaccaagcaaaccaggttactttgcttaatcaaggacacgagcggattatcactgccttaccacccgagttaaaagtgcaagccgccatttttagcttaggcgcactcagtcctgattcttttgaacacgtgacattgcctaacacgacaatctctgcctatcatcaaattctctcacggcttaatcgcggtggcttactggtattcgttgttgatcctcggttcaatgaaactcaagaagaaatcgactatctaatcgccgacttaagtcgcctagaaccaaccaattaccaagtaacccactacaaggcaatcaacgccgaccaaggacaagtcctagcgatagaaaaaatttagagtgcgtcgtaaggcgaatatccgctgaggattaacacagcgtcgtgaatgattacaacgtaatcgtttgcggctcagggttaaccggaagcggatgccttacagagcacgtttagagtgtgatcccagtcgggtatctcttgaggattagcctagactggcgaatgattgctgaaagcaatcgtttgacaatcgtcgctaaccggaaagagatgactgggtgagcacgtttagagtgcgtcgtcagtcgattatctcctattcaaacattaaaaaaaggcccagtcatcattgatgactgggccttttactatcttataatgtcccgaccacttttgtaccgtgtgcttcggaaatttgtaaacgttctgttaacgcgtcgacattgtcggctgtaatgccaccgccaggtaaaatcacaatccgcccatcagcagcttgaattaacgtttttaaacgggcttcgtcgatgggcgcgtctaacggccccccatgcgttaaaatccgtttaacatcatgatcaatcagccattccattgctgcagcttgttgatcagccgcaatttcatcgaaagccatatggaaaacaacttgcatcccattggcagcaccaatcaacatttccatcgcttcttcgtcgatttgattgtcaggtgttaggcaaccaaggacgatgccgtcagcgcctaattcttgcgctgaaaagatatcagcttccataatttttaattcttgatcgttataaacaaagttgccgccacgcggacgaatcatgaccatcactggtacatcgtgttcatgcgcataacgcactgattcagccatcacaccccggctaaccgttgtgcctccgacagccaagttgtcgttcaactcaattcgtttagcaccattgcggattgctgccggaattttagtgaaattttcaacacaaacttctttgattaacatggatgaaccctccaaattttaatttaatcctttatgcaaatagcattgcacctaagacaagtaggcccaagataatccggtaccaaccgaagaccttgaaatcatgtttcttgatgtaatccatcaagaatttgattgaaataattgaaacgatgaatgaaaccaacatcccgactaataaaatgattgattgatcgcccgtaaacgtattgccttggtacaagaatttaccaatcttcaagattgccacgccgaccatcgttggaatcgccatgaagaacgagaattccgcacccacaaaccgtgatgtccctaaaataattgcccctaaaatcgtagcgcctgaacgggatgtcccaggaataattgataaggcttggaaacagccaatccaaaaggccgtcaaccaaggtaacgtatttaaatcagcaaatttcggtgtggtatgcttgttgcgattttcgatgacgatgaacaaaaccccgtataaaatcaacatgctggccacaatccagtttttcatcagatgttcatccatccagtcattcaatgggaatccaataatgactgatggaatcaccgccacaattaccttaaaccataacgtccacgtttgtttttgttcgagctggttcttacgtggtgagaaaggattcaatttatggaagtatagaatcacaaccgccataatcgctccaaattgaatcacataattaaacatatcgatgaatgcttttgattcatcaagtttcaaaacactaccgaccaacactaaatggccggttgaactaattggtagccattctgtaaaaccttcgacaatccctaaaatgattgtcttaatcatatttaaagttaacacaatactaatccctccgtaatccataatcgtttattagtatactcattctaaagttagattgcgactcaaattgaaagcttaatcaaattttattcaattcgcccgcaggaaaagccaaatgacgttgatccatcactgcttgaaaatcggctggtagttcgctttgaaccgtgacataccgttcttcaaatggatgatagaacgttaactcgcgacagtgcaatgcttgacgcggtaataaatcatcggccacaccgtataaattatcaccaattaagggatgccccagtgatgcaaaatgaacccgaatctgatgtgtccgacctgttagtaacttcaacttaactaacgtggcatcggtgccatgggcttcttgccaatattccgttaatgagcgtttgccaccaaccccaacgacccgccgcatgtaaaaatcatccgaccgtttgattggccgatcgatccacgcatgttgcggataatctaaccgcatatcaccactggcaatcgcaacatatgttttttgcaattctttagattggagttgcttatccaacaaactatgcgcgaagccgtgcttggtgaacatcatcaaaccacttgtatcgcgatcgaggcgcgttactacgtgcactgcctggctctcagcattttggtcaatcaagtattgtttgacgaaattggccattgtgttgtgcggatggttcggtgccggtaacgacgccacaaacgccggtttatcgaccactaaaaaatggtcgtcttcaaaaaccactttcaagtcccctttaactgggatgacgtgttcgacggccacttccggtgcgaggtaaacagtcaccacatcgttttgaaccagttgggcattggtatgtgcctcctggccgttgacgaggattgtgccacctgcaaatttaattttagttaactgactgcgagaaagcttatgccgccgtaaaaaattccgcaacacacagccttctgcatcttgatattgccattcaaatttcatgttttgacccaataaatgcatcttcgacacggttccagaaatggttgtgtcgataacgtgcaaactgtattctttcctttgcaattttaaattgcatcgaggcaattggtcgatccttaaatgtgaattgatcaattgtcacaacgtaatcacttgtcttagaaggcttcaggagcaaccattcatccgatggtaacacgattggtgccgatagtgttcgatatacgcgattattaatcgacgcaatttcggtcatctgcatcgcgtctaagcgtggatgtaaaaccgccccaccaatcgacttactataagctgtcgacccagttggtgtggaaatacagagcccatcgcccctaaaactttcaaaaaaattctctttaatgtaaacgtccgtccgcaaagtcgctgcataccgacgtaacgtcacttcattgagcgccaaactgcgactgatttcgtgcgtatccgcatattcgattttaacttctaataacggatagctaatactctgcccgagatcttcttgcaaggcgacgactagatcatcgacttcaaaatcgcgccagtcagtgtaaaaccctaaatgtcccgtgtgcacgccaataaaccggatgtgcgctaaatcgtgggtgtaccgatgaaaggcagataaaagcgtcccatctccaccaactgaaatgaccacatcgggcgtttgatcatcaatgacaaaccccgtattgatcaatttttgcgttaagcgattggcaacttgaacggaagaactaccgtcattgctaaataccgttactttcaatctggcgtctctccttcagaatcattttcagttgccttttcaagtgcgttttgccattttccatatgagaagagttgttgtgcttcttgaatttcttcacgaatttcagacatttctttatctaacataaaggatgcttcggccgctcttttaagccgcgccttcagcgtttcaggaaattccccttgatatttataatttaatgaatgttcaatggttgcccaaaagttcatcgacattgttcgaatctgaatctcggccaaaatcaatttttcaccactgattagttggactggatattcaattacaatatgatatgaccggtaaccacttggtttaacatttgaaacgtaatcccgttcttcaacaattttcatatcagtccgttggtgcaaaaggcccacaatttcatggatatcttccacaaactgacacataatccgcaaaccagcgatatcttgcatatcttgttcgagtaaatcttctgtaatgtagcggcgttgcatcttttctttgatactatcgattggtttaacgcgcccagttacaaattcgatgggtgcatgttcattattttgttggtattgcttgcgcatcccacgtaatttaatttttaattcgctaacggcctgttcataaggcattaaaaacttcttccaattttcgaccattataaacccctcattcactctgtcacatacagcactattttaacatagattagaattgaataaataataatcgtctgaaatacaaatttcattacaagtctgcttttttgtgctaggataataacattgcttttttaaaaaggagctcaaccgatgtcacaaacgattgaacgcgaatttaagacgatgctaacggcggcgcaattctcgcaactaaaagcggactatccatttgcagcgccgtttgtgcaaactaattattacttcgaactgcctaaccagggattggctaaacgtcactgggggttgcgtattcgactctttgacacctatgccgaacagacgctaaaggtgccaaccgtagaaaatgctcatagtctgattgaaatcactgatcgcctaacacttgagcaggctactcacttaattgagcaccaaaccgtattatcgtctggtcagatcgctgtctattttgcagcacaagccgtgattatcaaagaattgttcatctggggacaggcaacaacgcaccgccagaccgcgtctttagttgctggcctgttaacgcttgatgttacccaataccctgacgaaacccaggattatgaagtcgaaattgaagtcaccaacgtccaagaaggggcaacttggtttaaatcatttgtcacccgctatcaattaagtgaacaaataccacccaataaaattatgcgcgcccttatccatcaagcttaaactttgtcaagctaacttattgcataattttaaaattttgttagagtagacagtacaagcgcgtcgagcagtatatacaatatagaaagtttggaggaaccaacttgttagaagtgtttttatttatcaacccaatcgggcaactttgtttacgttccgaagaggcacttttaaagattatcggcgaaaccgatgcaaatattcattttaagtttattccagtcttaaacttaaaaaacgtcgagcattacatgcagtttcagcaacaaaatagtcatgatttaaacttacgtaatcacgttttcagcaccatttatgaagcagtactcgcttataaggcagcaacgttccaggggggcaagaagagccaatcatttttaatgcaactgcaacaagcattccgtgaaccagatatggaacttaacaacgaattagtccttacaattgctaaacgcgtaggacttgataccgaaatgttacttgaagattggcacaatccacttactaaacaggcatttgattcagatcaacaattatcttgtgagatgaacattcagatgaccccttcagcagtagtcttcaactattcaaaaggtgaaagcgaatcaggcttattgattgaaaattgcgattcctatgaactcttgaaacaagcctgttgtgctgaaacaacacctgaacagactttccaagcacttcaaaaacaaaaaagcaccctctcacgggttgctttgcatgttatttcttaatcttagaaccggtggtcaaccgacccccggttcttttttaatgcttgtttcaaagctatttgcccccattgtgcaaataaggattgctttagtagtggttgttggagtaagggcgttaccgctaaaaaaagatcaattggttgggcactcaaccaccacgttacccgactttcaaactgactgagctgataaatgggtggtacattacgtgtgcagtaacaccagtccggaacggcttgcaagcgttcatggtgggcataacaatccgcctgtaacgcaacataatgtgcgtcttgcagccctaatcgacggtcaataatttgttgctgcataggctgtgacttgcccttataatgattggctggcagtcttgtttgtgctacaagcaagcgcacaaacgccttagttgtcaatcgcagggtttgccaagcataaccagcaaaatcacgggcgacaatatggtgatataacacccattgcccccactttggcaaataacttaccacataaaagccccactgccgccgatagttgataaaccccaactgttgctggcttaaataatggttagtaaaacaataccgttcaccaaccacccataatacaggtaatcggcgctgctgatagccgattgttcgttggtttaacttatctggcgtcaatgggctgcattggtattcaataattaatggttgctgattccgcgttaaccatacatcagcgcgctgtgtctcgccgacaggtacttcaaaggtagcatgccagcccaacgcatgtgctaattcagcaatcgcctgttttcccgccagatgggctggactctcaccaccaccagatacacgttctgcgatatgtgcgaaatatggtgctttatgcaccccacgatgcaactgaaccagttgttgacaatgtggacagaaataccgcgctacttgctgttgtttggctgcttgatcggcgcgaattaagcacccgttagtggtctgtgcaactttcattatttatcacccccaccgaaaatacgcaaaaaaataacgggttctcctaaatttaggaaaacccgttatttttaatgtttgaagtagtagcgtgttaactcaagcgcactattatccatgactttttcaccgaattcacttaaaaaagctgctgtgtattctgacttctgcccgtattcattagcgaccgctaaatcatcccgtgcaaacgcttcggtcgtattctccataaaaataataatctgtgcatagtactgatgtttgtaaagaaataggttcgacacaccactttcgatgtgtagctgttgtgccaaagcaatccaatcgtcaaatgacttaaacgataacacaatctgtttcattggattgtccgcttgattcatataagcggtcatttcatcctcttcctcagtcgcatcatcttggaccgtatctcgtttcaacagttgttctttaatgtattcagtaataccgtctttgccttgcaccatttctgattgacctttaccaccgtcaaagtttggcatattcttactaatcagtaattctaacccttgatcgttaggcaacacttggaacgttactgcatcgttgttcgcaaatgtgtgttcactgtccacttcttccagaattgaatagaagaaccgctcaatctttttatgattgctcaacaaatcaagtccagtaatcccgcgttcttctaaatcatcattttctaatagaacccgaattgtgttctcgtcgattttttccattctcatgggacaacgcccctttctaacgcgcttcttatagcgtcgtaattcactttctttgacctaccataccagtatctggcgtaacattcaagtatctacatcgcagcaattaattttttaacccatcaaaaaagtcgaggctgttaacagccccgactctcctctagaatcctgctagtaattgtgcttgttgtaattccaatgcccgtacttcacgtggtaagaaacgacgaatttcatcttcgttataaccaacctgaagtcgtttttcatccaaaataattggacgacgtaatagccctgggttcttttgaactaaatctaataattcgttgattgataagtcatcaattttaatgtttaattcttggaaaaccttagaacgcgttgagataatttcttccgtgccatcttcggtcatgcgtaagattgttttaatttcatttttattgagaggctccgaaaagatattgcgttcttggtatggaatattgtgttcttctaaccacgcccgggctttacgacaagatgtacaacttggtgatgtatataacgtaaccatatgtctctctcctttattaacatgacaccttacttaacaataagacaatcattttctctcttacaaattttattatacgcgagtcagcactagaaaactaccctaaaattaaatttattaattattttttaataattaataaatagacatttggacataaaacgtctaattaaaacggtttattgttaaattttcccactcaccattaatttttatgtttttacatttatatttatcattcaaaaaaaattatagtagtttctactttctaatgaaaattcacttattttttgtaagttccatcaacgccgcctatattacacgctccgacatcaattgtcaaatcctgttgggcaactatcacgggtacgtccccaacagtcgcttgtgcttgtgcctgtagcgtttctgccgaaaccccttgtggtaaatgcgttaatagaattttagctgcgccactttcttgtgccaagttaccggattgcgttgttgtcatatgcgccattttaccagtgcgatcttcaagaaaattcgtatcagtcatcagtaaatctgcagactgacaaaaagcagctaattctgggaaatacgccgtatctgcagtaaagaccaagacctgccccgtcgtttgttcttcaattcgaacagcgaatgctgggacaggatgcactgtccgtttgaaagttactttcaacggccccagggtcagctctgtgtcttcttgataaccaaagccctgcgtcacacccggttgtgtcaaactgccaaagtggagtggatcttgcagatgcccgtaaataggtaaaatgggttcctttttggttccttgatgcagttgccaataatattgtaaaacccccacatcagcaatgtgatcgtgatgatagtgcgtgagaaggaccacatctagttgcaatgggtcaagttgtttctcaagcgctaataaagcgccactcccacaatctagcaataaatgatacgccccacttgttaataaataactactagtcccaacaccggcgtatggatatccaccgtaataacctaagactgttaattgcatttttaaatgaccacctttctaatttctatagtagcgcattccgggtatcgcgcgcactatatttactaactaaataaaaaaagaccgccacccaaatggatgacggccctaatgctattgaatgacttggactttcttagctttaacttcttgatagaaaatcgtaacgctcataattaagtatggatagaaccacaagagacctagtccagcagtcatatagacgaccagttcccatccaataaatgataaagtaagcccgagtaatttcagccagttcccttttaaaatcacccatgaaaggctaaagattaatttgagtggtgcttgtggtaaatcaaacttcaacagtactaaaatctgataatacgttaaaatcacgggttgcaacagtgacaaaaccaacatcaccgtcacaaacaataagacagtttcagaaattgtcccctgctggctaatgtttagcaaataaggcgcaacggaatctaatccattaaaagtgaattgaaatacacgatcccaaccgagtaaccgataaaacggcgccaacccaattaatagtaagatccagtttaacacttgttgaacaagattcaataccacaagatgggtatacaacggttgccggaataacaataaggtatcccggtaatagctgggcttattctggctaactttataaacacctaagaaaacagcatttaaaaagataaagtataagaaataattggcaaaggtgttgagcatttgataaccaaatgaactggcgccaaacacgccttcaatcattgagtcgactactatctcaactaacaaccaaagcgcgactaaagcggccattttctgccagtttccttttaataattgacgcgcttttgcgcggtacatagctaattgcaaaaactttccctccgagtttagtagaacacatcactattgagcggtgcattcacaattcgattgtagatattggccgtaattagatagaaaacaaagtaaatgatgataaacaggccgcaaacgatataggctaattgtaacccaggattatctaaaaacaaacccaataaccgaattgcaaagaaggcgtgcatcgatcccaaaataattggcagtaaaaagagcatcaaaatttggaaataaatcgtgcgcttaatctcaccgtcactcatcccaatttttttcaatgttttatactgcaaaatctcttcttgtgcttctgacaattgtttcaacatgatgatactaccagtggctaacatgaagattaacccaataaaaatggcgacatacatataaaatccgaagtttgcgttagcaatatctcggttaggtttttttaaaagcacagaatagcggcttaactcttctagccgttgatcagtggttttaatttcataatgggtttgcccggcttttttgtgcgtcattaaataatcccattgtttgggcttttgagatagacggaataaatcgcgcattaatcgtttttgcttttgttgggcagcggagagctgaactgcatagatttgatcaactgaagttgcttggacttgttgatattcagcatcattggccacaatcacgtttaagttaccatcaaagaagacatcagaaccgtttggaaatagcttacgaatgtgtacaatccgaaaatctgaaagcccagactgttttaattgcaacgggattccagctcttttcggtggcaaacctgcacctgctctgcgaggcatcttcagcattgttaatggcaagttaatgatggtcaccacagtatttttcttcaatttagttgctggtaacttaaattgttgcgccattacttggttgtattgggataatggcatgacaacagctgctccatccattttgatgccttcccgatttaacggtgaattgaccttaaatcgagcatccaccaatttaaacgaagacattgtttgactaaccggctgaacatgatattgcgttaaaattttgtcgaccgctgctttttgactttgtgtataaaccaaatccaccggaatgttctgccgtaatgtatcttgaccgtgcgtataaatcatcgccgcacttccgattgcggtaatagtgactgcacttaaaatcgtaatcatccacaacatctttgcattctttttaaaacgaaaactcaaattcgtaacgtttaacaaatgtgtcccacgataataaagccgtttccagtgccgttctaactgtagccaaatttgcgtataggcctgaaaaaaagccagtgtgccaaaaatttcaagtaataaaatggttagtaaataaaccaaatcaatcccaaaaccatagcgccgctctaagctcggcatcaaaaccagtgtttggtctgccaaataatagccgctgataatcaatacaggtgcaataatcccccataaataagtcagccagttcggtcggcgcactttccgactgactgcagatggttgcagcaatgtcactaattgataccgataaatcatcgtactgtttaaaaaaccagttaataggaacaacccgccaaaggtgaatgtcgtttgttcaatggcccgccatgatattaaaaacggcatggcaaccgcaatccccatcatgcgtaataataacatcgcgaataatttcgaaaaaagaatcccgaataacaacccgataatcagggcaatcacaccgataatcaaactttcaaagaagaagagtaagctaatctgaaatttagtcaccccgatgacacttaaaacaccaatctcccgccgacgccttttaatgaaaaataaattagcatatgccaagaaaaaagcggcaaacagcaaaataattaaacctgctacttggatcatccggccaaaagctaaagattcaccagccatcttgaggtgcctaaagattggcgcagtttgaatcgacgtaaagcagaaataaaccacaatcgcggcaacacaggcaatcacataagccgcatagtcgcgcgcatgattaatcgcatttctaacggttaggtgtaacagcattgaaacggcctcctccacctatggttgcttgcatatcaataatttgattgaagaattgttgccgatcaccattgcgaacgatttccgagaataattgaccatctttaatgaaaagaattcgccgacagtaactagctgtaaaggcatcatgcgtgaccaataaaattgtcgtcttttcctgacgattaatcacggttaaatattgtaaaagctccgtagctgattttgaatctaaacttccagttggttcgtcggccaataacaaagtgggattggtaatcattgcgcgcccacatgccactcgttggcgctgtccaattgaaacttcatccggataacgatccaacaaactactaatgcccaagactcggctaactttatccaaccgtttttcaatcactggcacacttaacttatcaagcgctaatggcagtaacatgttttcgcgaaccgtcagtgaatctagtaagttaaaatcttgaaaaataaagcccaaatcttgccgcctaaaattagcaagcttagcttcccgcatccgactcacaacttgatctttaattaacacttgaccatgcgtcggccgatcaatggtcgcaatcatatttaataaggtcgttttcccagcgcctgaagggcccataataccgacaaactcccacggttcaatatcaaatgaaatattattaagcgcattgaccagactaaaccgatgcccgtagactttcgaaacttgttggactgatacgactgccattttttcacatcccttaactaattggtattcattttagcagagttgaccgcaaaagcccattttataactacgaccttagttggttgtcttttctagtgaaagtggttagtattagtctatctatgtatgaggagaattcattatgtttgaaattatgattgttgaagacgatccaacgattgccaacttaatcgctgagaacttaaataagtggcaattacacgcaaatattacgaccgatttcgataccattttcgaccaatttttaaccaataaaccccatctgattttactcgatatcaacctgcccgtttatgacgggttctactggtgtcgcaaaattcgtgaagtatctaaagtccccataattttcatttctagtcgcagtaccaacatggacatggtgatgtcgatgaacatgggcggcgatgacttcgtcaataaacctttttcgatggaagttttaattgccaaaattaacgccctcttacgacggacttacaactacgtcgaccaaaatgccgatatcatcgaacataacggcctaatgattaacctccaaagcggcggagctcaggtgggtgagactaccattgatctttccaaaaacgaatataagctcctccaatttctgatgcgtcaacacggccagattgtcagtcgcgaaaagttattgcgtgccctctgggacgatgaacggtttgtcgacgacaacacactaaccgttaacatcaatcggcttcgcaaaaaaattgaaagtgctggtttagaagactacattcagacgaaaattggccaaggctatatcatcccctaaggagttattatgacgtttaaaaaattcttacgtgatcatttatttcatatcgcttttttcttcagcggtatgattgttctggatatcgtcctatggctcgaccctagtatgcgctttgctaaggcgacacttttatacctcgatttattgctggcgctttttttctgcgcctttttggttggcttatacgtctaccatctcaagtggtaccgcacaatccaaacacgcttagatgctaaagaagatagcctcaactggccacttacaggcgctacctcggctgaaaaacaattcattcaacactacgtgaatcaactgctagcctatcatcaacaaagcatcgaccgactaatctcagcgcaacaagatcaaaagaatttcattgatggctgggtgcacgaaagcaaggtccccctggcagctactcaattgctcattgaatccatcgaagaccagattccagaagacaaattcaatcaattaaccgatgaactgattcaaattgaacactacgttgaacaagtgctctactactcgcgtctcgatagtttttctaaggattacttggtgcaggaatacgatttgaaacctttagtcaaccaaatcatccgccaaaatcgcaattattttattcaaaaacacatccaatttaaactgcttggtgccgatcaaaccgtcttaaccgatgctaaatggctggcttttattttgaatcaaatcatttccaatgcgttaaagtataccccagatggcgcacaaattacggttcagattgaacgtgacgaacaaggcgtttggttaagtgtcatcgatacagggattgggattccggctgaagacctaccccgaatttttgataaagggttcaccggtcaaaatgggcgctattctaaccaacgttcaaccggtttagggctctatcttgcacgtgccttaagtgaaaagctcggtcacgaactcaccgttagctcccaacaaggcagtggttccacttttaaattactctttccttttttaagttactacaacacggatgacgatgacggcttattcggcaaaacccatcctgcagacaaatgaaacggagcttcaaaatgcgtaaaacacttttaatcactacccttttaacaataacactcctagcaggttgccaagctaaaaaaccggcttcatcaaccacatcccgcgcgcagccaactacgacgacctacgccaaccggaaaacaactaaaaaagccctcgcgaccgattcacagacttggttgtttaacaaacaactcctttctaagcaaactaaaaacggtctttctgatgacatcaccgtttcaaatattgctcaaatgaccactcctaaaagttggctgacctctaaaggcaccttcacaagtcagccgattaattatcaacaaatttcgtttaaaaaatggcaacaagatagccgcagtcatctgatgaagagctatcaaaagacactccatctgatgactgtggcacaagtcaacgctgcattacacaaattgggggctgactttaagattaaacacctctcagatctcgtctttcttgagactaagactgggaaaaatacaattgaccaaggattcgttgccaaaggaaatcatctatacgcaattacagctcattacagagatatacaagaacccaccaattttgaccgcggacagttattcgtcagtcaaaaagcaaccgccaaaacaaccgccagtcctgttgccctcgaccaactcaatggcacttggattgcggccgcaacaacgacgagtgctaatgacaccggaaaactgatggtcaaagatggcttcatgtaccaaaaacgttatgatagtattgaacgctctgccattcaagatcttgccaaatacactttagtaacgctcaatcaaaatacaatctatgctgctcaaaaaagggatgcagcacaagctggttatcaattaacccctaagtcgattgctagtggtgatagtatcggttatctctacctcttcatgaatgatcatgaactgctacgcatcggtgctggtcaagtaacaagctatcaaaagacggattcactagtagctactgccgatttatcacagactgatcaaaccatttttgagcaacttgatcaacaaaagcctggtgaatcagcttcaaccattacggtcaaagcaggtcccgctgttgtcgggatgagtgatagtgtcaactatctaaccgatgcaaccgctgaccagatttcgaacaatatcgtcattggtagcgttcaaaacgggcacgtcaccattgcaagtgagtcaactcattaattataggcacaaaaaaaaggtccgacatgaatgtcggacctttttttgtgcttaagccgcttgatcgcgggctgcttcttcttttaaagccatgtctgtggcgatcttgatgaatggtaggtaaatgagcactgaaacaagtaagttcactgctgctaataccccaccttgccaactaaccgttgcgatgaccccaccgataattggtggtgttacccaaggtggcataaccgttgcagcgggcactaacccggtgctagttgcaaagtatgcaattgtaacgatcaccattggtgtggcaatatatgggatgaataaaattgggttcaatacgattgcaagccaaatgttaatggttcgttaatattgaagaccccaggagcggcactcaaattcccaacgattgaatattgtttattctttcgacccactaaccagattgcaatgattaagcctaaagtagcaccagtcccacctaagttaacaaatgaatcaaagaatggtttgttaacaatatatggtgctgctttaccagctttaatcgcatttaagttagctgtaattgcaggtgcattgattgtttgcatgaatggttcgatcatgttagcaccgtgtaacccgaagaaccataagaatggtgtgatgaatgctaataataatgctgaaggatagctgtttgcaagtccttggaatggttcttggacggctttgtagaatgatgtcacaatattttcaacaccaaagcctaatagaattgttgcaaataatgagaagactgcgatggtaatcattgatggcaataatgccgcgaatgattgtgaaactgcaggtggtaccccatcaggcatcttaatgactaagtgtttattacccaataaacgtctgagaatttctgttgaaatcatcgcaacgattaaagcaacgaacaagcccattgagtccatccctgcaagaccgccagcagcaaagaatgaccctaatgctgttacgccggctgctagtggattgatattatatgacttacctaaattgtaagcaactaggaagacgataaacacagaaagaatcgcaaatatcccgctccaagcattgcccccgaatttagtccagatataagccttttcagcgcccttaccaactgtctttgagaacacactatccatgaaattggtatatgccggaattggtaaattattaatcaaggttgcaaaagcccccaagatcatcaatggcatcgttgttacgaaggcatcacgaatggcaaatgtcgttgattcccaacttttgccacaactggtaaaaagcgtttctccatgaaactgataaatgaatccattaacctcactccttttcctgaatcataattaaaaaataattgctattacaagtattatgttacagaaagcgttgtcaaacgataaccccgttcattacctatgaatgtccagtttttcacaaaaactaaaaaaagcgccaacccattctaatcatggattgacgctcttttttatccgtgttaggtatataccaatgacggaaaatgaaaattaaatttttaataactttattttacatattactttcaatgaacaagctttgcccatataacgggctttttagcggctaatgattttttgacatcgataatccgttgattggcactccctctgaattgcaatgtcaaatccatttggtccttcatgaagcgcccatcaactaagatatcaatcttagacagcaactcgagtttatcatctgattcttgcatcagttcttcccacgtatatcccgtccatgaccagacgtcttttgtctgcccataagtggcgcgaattcggtctactagcgataaacaagtcttggtattcaagaacggttcgccacctaataacgtcagtccttggacataagattgccctaaatcagcaataatttggtcttctaattcagttgtataagggcggccatagcgaaaattctgcgccactcgattgtaacaaccggggcaagcaaacatgcaaccactcacatataggctacagcgcaccccttcgccatcaacaaagttaaacggtttataatctgcaatataatcctggcttagtgtttcagaaagccattctttgggcgccggattcttcgggccttgttgttttactgccatcttcaaaaactccttcaaatcccgtattcacaattactgccgtgcaacgttgttattatcgttgccaatggtaatatgcatgtgcttaactcgactggcgatttccttatgccgaccatgcaccattggacgttgttgtggattgcctagataaccacaagtccgcttaacgacgtcacatgtagcagcatccgtgttcccacattgtgggcattggaacccgcgttctgtcggcttaaagtcccctttaaacccacatttaaagcattgatcaattggcgtattcgtgcctaagtagccgacacgatcgtaagcataatcccagacagcttctaaagcctttggattttgacgcagatttgggtattcacagtaatgaatgaacccaccagaacagtattttggataatctttttcaaaatctaatttttcaaatggggttggtgctttacgcacatcgtagtggaaactatttgtgtagtattctttgtctgtaatattttcgacaatgccaaatttttgcgtatctttttgacagaacgtatttgttaaactttctgctggtgtgctgtaaacagagaagtgatagccgtattccttttcccaatcaacgcagtgattatagaggtctttaacgacgtctaccgtaaaggcttttgccttggcatccttttcccagtctggcccaaagaaggctgtaccgacttcataaaggccaatatagcccaatgaaacagttgcgcgtgaatttttaaagacttcatcaacactatcggttttcttcaaacgcttgccaaaggcaccatattcataaagaatcggcgcattttctggcttcgcttctttagcgcgttccactttaaagaccagggcttccttgcagacttgcaaccgttgttctagaatttcccagaacttagcttggttgccatcagcttcaagtgcaatccgtggtaaattgattgtcaccacgccgagattcatccggccactattcacttcttcaccatgttcgtttttccagccttgtaagaagcttcgacaacccattggtgctttgaaagaacccgttaattccaccaacttgtcatacattaaaacatcgggatacatccgttttgtggcacattcaacagctaattgtttgatgtcataatttggatcagttggatttaagtttaagccgcgttttactgcaaaaactaatttagggaagatggcagtccgtttttctttacctaatccttcaattcgaattgaaagaattgctttttgaatcgcacgttcaatccagttactgcctaatccaaaaccaagcgttgtaaatggtgtttggccttgggatgaatataaagtattgatttcatattccaacgcttgcatggcgtcataaatatctttttcagtcttggtttgcgcataatccttttgttttgcttcgccatcaatccaattcttggcatctgctaaatgtttggcataattcttttcggcaaatggtgccaataattcatccacccgatcagcggaacaaccaccatattgactagaagcaacgttagcaataatttgtgacatttgtgccgtagcagtttgaatcgaatgtggcgcttcaacttcggcattcccaatcttaaagccatgattcaacatttctttaaaatcgattaaacaacaattggtcattggactatatggttggtaatccaaatcgtgccaatgaatctcgccttttaaatgggcgttcgccactttatcaggcaacatcttaagccccatcgctttagcaactgtccctgccgttaggtcccgctgtgtattaaaaacatgactatctttattcgcattttcattgaccacagtttggtcttttttcaataatttttgaatggtaaagttgatatcagttgccttattccgggcaaagtcccgttgcgtccggtagttaatgtattcttgggcaatatcatattggtgatgttctaaaagtttatgttccacaatattttgcagttcatagattttaacatctttatcaaatcggctgccgacttcactcacaacatctagtgcgactgtgtttaacacttgatagtctaatggctctaattccgtcttcacatttttagcggctttaataattgcttgttcgattttatccgcagaaaaaggcatgattcgcccatctcttttaatcactttaatttgcaagtctgcttctgaagcaattttcatatccatcttagcaccagtctccttttgaatcagtaaccccatcatagcggattaaaaattcagattcaacctatatatagtagataaaccaacaaaaagacgcactacaactatatgttgtgtgcgtctaattgtgtgcgatattttctttcgcccgtccttatcgaaatctacttcatactgcttaaaaaaagattgacatcatgcatctcgttttaatttcaaagtcattgcattaatagccacaacaattgttgagagtgacattaagattgcaccaactgctggacttaatactaacccaattccggcaaatagccccccagctaatggaatcgctaaaatattataaccagcgccccaccagagattttgcgtcattttgcggttagttgcgtgcgataaattcaagaaatgcataatatcgtttggattactcttcacgaggatcacatctgctgaatcgattgcaacatccgtcccagcaccaattgcgattccgatatcagcccgcgttaaacctggtgcatcattaacaccatccccaaccatcaggacgacttcgcctttagcttggtaatctttgacaattgcttctttatcttctggtttcaagttcgcttgaaccgtcataccgcccaattgtgcagccactttttcggcaacttgttgattatcaccggttaacatgaccggttggatatgccgtttctttaatgcttggatgaaagctggcgcttctggtttaatctgatcaccttgtgcgactagtcctaaaaccgtttgatcttgtaatagataactgatggaattccctttttctgctaaagtttggaaaagagcttgatcaaatttaatatgctgggcttgtaaataagttgccgtcactatttgataactttgccctgcaaccgttccagacaaaccgacgccttgaatcgtttgaacattgtctgcctgtaaatcaggaatagtttgtgcttggttatactctagaatcccagtggccaatggatgacttgaatggcgttctaacgcaccaaagaattgcatgagtcgttgttcatcaagtgctgtatcgaaaacttcgacagcattcactttgaatgcaccttgtgtcaaagtccccgtcttatccatcaaaacaacggtaaccttatctgacaattcgattgcttcacggttacgaatgagcaagccgtttgtagccgcaatcgctgtacttctggcaaccaccaatggaatggccaatccaagtgcatgcggacaagcaataataaagacggttaccatccgttcaaaagccgtattcagatcggccaagaacacccaactaatgaaggcgataatcccagcaaccaatgcagcatagaaaagatacttcgcaactttatctgctaacccttcaacttttgatttttcttgttgtgcttgtttaattaatttcatgacttgcgctaagtaaccactttcgccagtcccggtcacttgcacggttaacgtcccatttccattgactgtcccaccgattacttgatcgccttcagccttcacaacagcctttgattcacctgtcactaaggattcattgacttggctttgaccggcgataattaacccatccgcgggtactttttcaccagctgcgactaatacagtttgtccttttttcaagtcctttaaatcaaccgcgtgttgatgccctgcttgatcaattacttgtgcttggccgggtaacaaagcagccattttttctaaagcactccctgcactcattaccgcattcatttcaatccagtgtcccaacaacataatgacgattaacgttgcaagctcccagaaaaagtccatcacgtggccttgtgggttcaagaaatggttcgcaacaaaggcgtataaactatatagataagaaacactgatccccattgcaattaaggtcatcatcgctgggctcttagcagataattctccttgagcgccctttaaaaacggtgccccaccgtaaaagaagagaaatgttgctaaaatcaatactagccaatctgaacctgggaaagtcgtttgaaaaggtaactgcatgcccataaatggtgagagaattagaattggtaccgttgcaattaatgaaatccagaatttttgtttcagatttcccatgtgcatcatatgaccaccatgcatcatcatatcgccgtcgcccatgtcatggtgcatcccatgcatatcgtgattcatatgccccatatcatgatccatcatctcgtggtcatgatgcatgtcgtgcatgctgtggtccatctgatgttcatgctgcatctctttcatatcatgtccttcatgttcgtggtgcatttcatcgtgtttcattttacttcctcctctatgcaatcacaattggctggtaaacaatcacattcaatcattgttggtgcactaggtaatttagccgctaacaccgtttgtaacgtctgaatatcatcttgactgagcgttgtttgctcaattaaagtggctaatgtgcggccttttttcatcccacacaattggttaaacagcgactgcgtggcatggttcatcgcttcatcttctgcgatattggccgtatatataaatcggcgcccttctttagtggcaattaaatagtcttttttaaccaaccgacctaccaaagtcttaacagtcgacgcttgccaatcacgcttttgctgaacgagttcaattaaatgactgctgttgacttgcccaagtgaccaaaccatccgcataatttcccattcggcatccgtaataacccctattttttcagtcattcgcggttttctccctttcgtttacatttgtaatcattagttacagtttacatttgtaatcgataactgtcaatcttttttgctcatccacattttacgcacaaaaaaagaccgccacagtgggcggtcttttaccatttaattaaagattttgcataaaatcttcaactaatttttggttttcttcattacttatattcacattaacagcggtttcaactaaatcagttaattgagttgtatctaaacgtttcatcaagctccgaacccgaaggaccgaagttgcgctcattgaaaattcatctaagcccattccaacaaggagtggtgccatgactgaatcgccagcggcttccccacacattccagtccacttaccttctttatgagaagcgtcaataacgttcttaattaaacgtaagattgctggattgtatggttgataaaggtatgatacacgttcattcatccgatcagcagccattgtgtattgaatcaagtcgtttgttccgatactaaagaagtcaacttccttagcgaattgatttgccaagacggcgctggctggaatttcaaccatcatcccaacttgtaaatcatcagaaacagtttgaccatcagcaattaatttagctttttcttcttcaagaatgccttttgcttgacggaattctgcgatagttgcgatcattgggaacatgatacgtaacttaccgtagtttgaagcacggagtaaagcacgcaattgtgttctgaaaatatcatcacgatctaaactaatccgcacagcacggtagcctaagaatggattcatttcttcgggtaatggcaagtaaggtaatttcttatccccaccaatgtccattgtccgcacaacaactggtttaccagccataccttccaaaacagtcttataagcttcgaactgatcatcttcactaggtaattcagatgagtccatgtataagaattctgtccggtataagccgattgcttcagcaccgttatcgataacaccatctaaatctttaggtgtcccgatatttgcagcaactgtgaatgtttttccgtcttttgtaacggatttttcattctttaacttttcccattctgctttttgatcagcgaaagcttgcgccttcttatcgtattcagcaatgtctgcatctgtaggattgataataacatccccgttaatcccgtcgacaattaattgttcgccggctttaacagaagttgtgatattttcagtcccaacaattgcaggaatttctaaagaacgagccataatagcagagtgagaagtccgaccaccaatatcagtcacaaaagccttaacgaatttaccgtttaattgggctgtgtcacttggtgtcaagtcatgagcaatcacaattacttcttcatcaattaacgctgggttagggagtgttacccctaataaatgactgagaactcgcttagtaacatccttgatgtcagcagcgcgttcttgcatgtatgcgttatcagtcatagcctcaaaagtggccacgaataaatccgcgatctctttgagcgcttgctcagcattaaccttgtcatcattgattttaccttcgatagcgccggtaaattctgggtctgctaaaatcatcatgtgggcatcaaaaacttgtgcttcttcttcccctagtgatccagcagcaatcttccgaatggtctctagatcactcgtggaagcttgtaaggcattatgcaaacgattaatctctttttctgaatctgaaatagttgatttcgaaaatgacaaatcgggttgcactaacatataggctttcgccgtagcgataccatcactggcagcaatccctcttagttttgtcattattcagataaaccttcctttttcattgtttcttcaattgcgttgattgcgtctgcttcgtcagcaccttcagctgagatagtaacgtcagcaccttggccaacaccgagtgacataacacccatgattgacttcaagtttacagatttacctttgtattctaagttaacatctgagttaaatttgcttgctgtttgtactaataatgtagctggacgtgcgtggatacctgtgtctgctactacgtgaaaatcgcgtttttccatattaatcgatccccttttatctaattatagatttagtttttaacgaaatgagtggtcactagtagtggctacccttccgatatttaagattaccattttttttaaaatactacaatagtttcgctaacaaaattagtagccgtctacactataccgctttcagacttgcggtagattaccgcaccatttcgttgtgcttcgcccacaatttcttttcgatggtcatagttgacccatactttctgaaaatctaaaaattcggactgagcaacctcaatctcagtttgttcgttatttattaaggcatccatctctgctaaaaaatcacgcatctgccattctgcctcctttgcaattcttttatcgtggcttgaaaaattcgttttcattccatctgcgaaataaaacgatgacctcatactaccgcataccgcccatacctgacaagaaacttttattttcgagttgcctgacttgcaactttttttagagatgattataatttggataaaggtcaaagatagtcaagaacactttgacgattctattattaatgaaaggttgtgacagattaatgctttgtcaaaactgccagaagaatcctgcaacgattcatctctatacaagcaccaatggtcaacgacaagaaatcgatctttgtcaaaactgttaccaactcttgaaacaacaaaacagtaatggccaagcaccacaagggcaatatgcagatccatttggctttggaagcctggatagtttcttccgagcaatgggcgcaactcccgatgatcaatcacaagcaaaccaagggccacaaacccaaagtggcggccaaggtggcggcaacaacgggcaaaacggcgaaagtctgctcagtcaatacggtgtaaacctaaccaacttagctaaagctggccaaattgatccagtgatcggtcgcgatgctgaaatcgatcgtgttattgaaattctaaaccgtcggacaaaaaacaatcccgtattaattggtgaagctggggtcggtaaaaccgccgttgtcgaaggcttagctcaaaaaattgccgacgatgacgttcctgccaaacttaaggataaacaagtcattcgcttagatgttgtttcacttgttcaagggaccggtattcgtggtcaattcgaacaacggatgcaacaactgatgactgaattgaagcagaataagcaatacattctcttcattgatgaaattcatgaaattgtgggcgccggtaatgccgaaggtggcatggacgccggtaacgtgttaaaacccgccctcgcccgtggtgaactccaactagtaggggccacaacgaataatgaattccgacaaattgaaaaagacgcggccctcgcccgtcgtctccaacccgtttcagtcaatgaaccttctgttgacgaaacagtccaaattctaaaaggactccaagataaatacgaagcctatcaccaagtccactacacagacgaggcacttaaggcggctgcaaccctttctaatcgttatatccaggatcgtttcttaccagataaggccatcgacttacttgatgaaaccggctctaagaagaacttgacgattaccgttgtcgatccaaaagaaatcgaaaagaaattacaaaatgcggaagctgaaaagcaaagtgcgttaaaggacgaggattacgaaaaggccgcttattaccgcgatcaagtcacaaaattgaccaagatgcgcgaaacaagtgccattgaccaatctgaaatgccaaccgtcaccgacaaagatatggaaaaaatcgttgaagaaaaaacccacattccagttggtgagttaaaggcacaagaacaagcacagttgaagaaccttgctgaaaatcttgaagcgcacgtaattggtcaagattcagcagtcgataaggttgcccgttccattcgtcgcaaccgaattggtttcaacaaatccggtcgaccaatcggttctttcctattcgttggaccaaccggggtcgggaaaactgaattagcaaaacaaatcgccaaagaacttttcggtagcacagatgctatgattcgttttgatatgagcgaatatatggagaaattcagtgtgtcaaaattgattggatcacctcctggctatgttggctatgaagaagcgggtcaattaaccgaacaagttcggcgcaacccatacagcttgatcttactggatgaagttgaaaaagcacatccagacgtcatgcatatgttcctacaaatcttagacgatggtcgtctgacggattcacaaggacggacggtcagcttcaaagacaccatcatcatcatgacttcaaatgccggccaaactgatgccgaagccaatgttggtttcggggcaaccctttctggtcagacacactcgattttaaaccaactacaaaactactttaaacctgaatttttaaaccggtttgatgatatcatcgagttccaaccattaagcaaagaaaatctcttgaagattgtcagtctgatgctcgatcaaacaaatgcgatgattgctgaccaagggttaaacattgccgtaactgaaccagtcaaatcacggcttgtcgatcttggttacaatccagagatgggtgcgcgtccattacgacgtgttattcaagaacaaattgaagatcgcgtggctgactattatctcgatcacccagaacataaacaattgacggctcggttggtggaagatcagattcaaatcaccgatgctaaagagtcacaggtcacagattaaaaggctttattatctcaagttaaaacgaattacgtgccaaatgaagcgttttcagttatactagtggtaagacttaaacatccagggagtgatttagatgcgcttaatcaatgtaaccaattcttataagcgacttgtttcacaacaactcgctgcaacagccgcaacctacgttaaggtttattcacttggtaaaacaacggttcttgactcgcgttcatcgaaggaacgtgagctccttttaaaaaatgatcatcgacatgtccaacaagccgagatcgattttgtattgaaggaactcgccggtttagattccacagatggccttgaagtcttgaatgatggtccattagtcgaaattacaattccaacaccttcaaaaacagtgagttaatcattcgaaccgccccgacatttcattttgttggggcggttttttacataggcaaaataatggcaattgaataggtcgtatcgtataataactttcaacctaatttaggaggattaatgacgcgatgaagacttttcaaaaagagcaccaaattatttgccggttagaagtgggcgacgaaatcctaacagaacttaaatatttggccgcaaccttccccaaccaactgggaactatcacggggattggtgcctgtgatgaagttaccgtcagcgtttattcaccagaaacggatcaatatattgccacttccagtcaagagcaagtagaactgctggcccttagtgggaatgtcgaaaatgcaaatggcacgattgatgtccatctacatgcaagctttgcccgtttagatacaagcgtttttggtgggcatctagaacgcgccgtcatttcacgtacaggagaattaatcgtttccttaattcccgtttccatcggccgcgtcacccatactgcaactaaattacaagtattagatatttaaacgattagaatcactgctatttttgcaggggttcttttttatgcccacttgacgcgttaattatcaaccacactttttgtaatttatgatagactagtagtaataagtaatgcgctacaaggagtccgtatgaatctgattaacctgcttcaatcgttattgaaatggcgcccgaaaaaagcagctcctctaccgaacagtcatgtacgccaaactgtctctgagcaagagcccatccgtcaagcgcctcaatcgtcacagaaacagccggtcgttcccgttagtcaggacgcaacgccactgctggctacgatgtccacacaaccgcgccatagcacagttaccattcactacctcgatcatcatcgggtccctttacgaccaacgatgaccctgacaggtgaagtgggtaccgtgctcaatttgccatggctaaaatttgccggttattacttggcagctattaccaatttaaaacaacagtttcctgaagaaaacaccactatctggcttttttataaaccgcaactcgcagcaccagtaatggtgttacaccagaatttagaaggtggcttgttgattaagccccaatttttatcaggtgctttgaacgaacactatcaagccaatccactagaaggtggtgctaacttcgtgcaccacacctcagctaatcagactggtcgctttacaactaagacacagtttgtccattttaaatatgatccgctgaatttaaaacacagcgatgcacctgaacagcccttcatcgaacttcttgagccaacggatacctatcagcaaccaagtgaagaagcgctgactgctgctcgcttgccaaagcacgcggtttggaagatttatagctgtgcaactgctccatctggcaaacaatggttcaatcttggcagttcttggattacccctacgcgttatcaattacatgccactaatcctaaaggcagtgatgaatcataccaagtaccaaagttcacctaccattacgcagttatcgaaacaacccctctaaacctcagtgcaagtctgaacaacaataccgtaacattttggcaagcaccgtatgaccaacccacaacatatcagatagtgcctaaaacacgggtagtcgttaagcaagtcgttgtactcgataatcaaagtcgctggtgtcaacttaaaacaggtcagtggttaatggaaggcctcctaacttttgactaaatacccccctaaaaaaaataagccgccgattcagacaacagttagtgtgtctgaatcggcggcttatttttgtttgactctttatattatagttttgcggttaattcaacgtctggatacttatcttggaaccaacgttctgcaaattgattttcaaataagaacaatggttcgtcatgaatatcttttaccaatagatttcgtgaggatgacatccgttcatccaattgttctggattgatccaccgcgcagttcttgaaccgattggatccatcaatacttcagaattatattcgtgttgcatccgatattggaacacttcaaattgtaattgaccaacggcgcctaagatataatcgccagttgtgtaagtcttatacaactgaatcgccccttcttgaaccaactgttgaatccctttatggaaggacttttgtttcatcacgttcttggcagtgacgcgcatgaataattcaggggtaaattgagggagtttctcaaatgaaacagcctctttacccgtgtgaatcgtatccccaatttggaaattcccggtatcatataatccaacaatatcgccagcaacagcgcttgtcacttgttcccgtgtgtcggccatgaactcagttgaattgttcaaccgcatcttcttgcctgttcgcgtcaatgtgacatcaattccgcgttggaattcacccgaacaaattcgtacgaacgcaatccggtcacgatgagctggattcatattggcttgaatcttgaagatgaaccctgagaaatcaggagaggttggttcaaccaacgtttcttcttgtgttttgtgtgcttctggggcaggcgctaagttaacgaatgattctaagaacgtcttaaccccaaagttagtcaaagcagagccaaagaagattggtgtttgttcacccgttgcaatcttatcagcatcataggcattgcctgcttcaccgatcaattcgatatcatcaagggcttgtgtgtaaacagaatcttctttcaatggattatcaccggcaatccgacctgcttcatcaagggccaaataagggttggcttcgtcttctggtcgataaagttcgattcgacggttggcgatatcataaaggccacggaggtcttttcccatcccgattggccagttcatagcacagccttcgatgtccaatagttcttccaattcagcaatcaaatcaagtggttcacgaccatcgcgatccaacttattcatgaaggtgaaaatcggaatcccccgcattttgcagactttgaataatttcttggtctgtggttcaatccctttagcagaatcaatgaccatgaccgccgcatcaacagccatcaaagtccgatacgtatcttctgagaaatcttcatgtcccggtgtatccaaaatattaatccgcttgtcgtcataatcaaattgcatcacagaactggtaacggaaatcccacgttgcttttcaatttccatccaatcggacttggcaaattggccactctttttccctttaactgttccggcttgacgaatcacgcccccgaaaagtaagagttgttccgtaatcgttgttttaccagcatccggatgagaaataattgcaaaagtacgacgacgatcaaccgccgtttttaattcagtaggtgtcattataaaatcctttccgttattccaatataatgcgcttgggacaaagaattgcgcaaccattgcgtcaccctttgtcccattgattgtgctcatttaatttagtcgacttcttctggtgcatcggtctctggttctggtaacgttaattgtaaatcaatcaaccgtgaaccggaaaccgaccccgtcgttaagctcatgccacctggcagctcaattgtttccggatgaccactgactggaatggcaccaatttcagtaatcacgaacccggcaattgtatccacatcagtgacttgaatatctgtattgaaggcactgttaaattcattgattggcatacttcccataacggtgtaatgctgcgcatcaattttttggtacaattcttcagctttatcagattcatcatcgatttcaccaacaatttcttccaataaatcttcaatcgtggctaagccaacaacgccaccgtattcatccaacagaattgccatttgttgctgtgtgcgtttcatttcaaataataaatcatcaattgtaatcgtttcgggaacaaaaagaggttctttcattaccgcttcgatttgcatggcctgaaaacctttttggcgtgcttctttcaagagattcttgatatgcacgacccccaccacttgatccttatcatcccgataaaccggaatgcgggagaatggttgggctaagatggcatcgatgttttgatcgttgtctgcacaaatatcaatcataaatgcatcagtccgcggtaccatgacttcgcgcgccatcttcttattgagggtaataatcccctctaacatttcgtattcatcggtttccagaacaccggcactcttcccagattcaatcatgtggaccatttcttctcgggtgagcttcggttctgtttctgaaaaatcaattggtgtcaacttcattaagagcgaggtcgacattgatagcaaccacacgaatggtcgcagtaagataccgacgatccgcacgggttgcaccgttattttagcaattgcttctgcacgatgcagtgcaacttgcttaggatataattccccaaaaaccagggatacataggataagacaatcgtcacaattaatacggccgcttcctttgtccaagccgcatttcctaaaaggggtgctaatctacccgcaatggttgtggcagcactcgctgaagataagaagcccgcaaacgtaatcgcaacttgaattgttgctaaaaactgattggaatgacctaagacttgaactaatactcgcgccttcttgtcacctttattggcttgctcctccatcttcacacgacttagtgacacaagtgcaatttctgccgcagcaaaaaaagcattcactaaggtcaaaattaatatcaacagtaactgtccccacaccgaacttccagggtcaggattcatcgtcacatccactacctttcattatctaaataagtacatttagccgaatatggcctaccttgcagtatagcatagtcaaaaatggaaattcaacctgcatcttttaaaggtcggtcccttttttagctttagtccgtaacgcttgaatatcatataaataagtaatcactgtcttggtaacagcataaaacggaatcgctaaaatcatgcctaaaatcccataaatattcccagcgaccaataagataatgatgatggttagcggatgaatatctaatgaacggccaatcacgttaggataaatcaagttcccatcgatttgttgaacaacaatgacgacaacaatcaccatgattgttttgggaatcgaaattgataaactgataatcaacgcgggcgcaatcccaatataaggccctaagtatggaattacgttagaaacgccagcaataaatcctaacaaataagcgtatggcatcccgataatgagataaccaataaatgtaaagacgccaacgaataaacactctagagcttgaccaccgatataagctgaaatcgtcgcccccatcttccgaagcaagtccgccacttggtcgttataacgatcaggtaacatcttttgaatattaggcactaaacggtgtccgtcttttaacatatagaacaacataattggaatcgtgaagacactaactgtaacgctcgtaatcgcaccaatcatactaccaaaaccagatgtgaaactcttcataactttttcagcaatcttcgatggttttaaatctaactgattgacgtatttattgaagtcaatgtttttcaagcgcggattgctagataaatcatccgctactttttgcagtcgatgagcaaaatctggtaggttcgtcacaagttgtgtgatttgtttaatcaagttaggaatcacagtggctacaatgaaaattaaaccgccaaaaaagacgatgaagataatcgtaatcgcccagttgcgtgatattttgagtttacctaacagattgattagcgggttaaacaggtaaaataatagtcccgcgccaataattggcccaaataaagttgaaataaaggtgccaattggatcaaataagaaactaattttggtgcaaacaaagattaacacagccaaaatcaaaagctcaattgaccaaaataatagttttgattggcgtaaacgatcaaacatgcagtatccccccagtgtgcctatgtcacacaaaacgcattttatgctatcatagtgtaacgattattgttattgtaccaaattttatagtgatacacattgattattccttttgaagaggtggttttttaatgttagtgaaacaaactcgtgatttaaaaagtacggtttatcaagatagtttggcaattcggcaagccgtattcattgttgaacaacacgtgcctgctgaacttgagattgatgaattcgaagaccaagcgatttattttgtcggctacgttgctgatcaagccgttgtgacgttgcggctcatcgaagcggactcagattatcatgttcaacgtgtcgcagttagccgttcagcacggcatcatggttatggtcaagaactgatgcgtgccgctgaagtttttgctcgggaatcaggcaaagcaacgctcactttaaatgctcaattaagtgcagtaccgttctatacgcagcttaattttcaagcaaccgccaaaccacagttcctagatgccgggattatgcatcaagaaatggttaaaaaattaactgactaattgtcatttcaccactaaatgacttataatgaacacagcttaataacagaaaggacgttaccatgcctaagcaaaaatcacttcttgtccacttatttttcttcattatcccttatctactcgtcattacgattgccgcaacggcttacgacagtcttgtgattcacagtgccacttgggatcgcaccttgttcagtgctctaatcagcagcaccctaatgttatttattaaagttccaatcgaacgaccgttgacgattatggctgacttagcccctaaccaaacacttaaaatggtaacaagtttcttcctagtagaacgttcacttggtattaagattgctaacttcatttttgatggcattcttttctgccttgcaacctatctgttacgccacttcttaccactcaacatcattgctggtagtttactcggctggtgcgtcttcgcgcttttgctatccatcagcatcggtgctggcatcggctttaaaacattaacgattcaacaagatacttcagtcgaaaacgattaacccatacaaaaaagctccagtcaatcaatgactggggcttttttgcttgagactaaatagtgttctaacgacggtgcgccaattcttgataccggttataccaaatatcaatgtattccttcgaaaagggccctttgccattgttgatccaatcaaccaaaaccttaacgttggcttttaaaatccgatcagtttcggcggaataatgccattgcgcactgtgcgcttcatattcatcgacatctagaagccgtttttcgccattggggaaaaccttcacatctaaatcataatcgatatacttaagcgcctcttgatccatgacatgcggcgatgccaaattacaataataagaaacgccgccctcacgaatcattgccaccacgttaaaccaatacttcttatggaaataaataagtgccggctcccgcgtgacccactttctgccgtctgactctgtaactaaggtatgatcgttacaaccaatgactgcgttctcgctggttttcaaaaccatcgtatcgcgccaagtgcggtgtaaactcccatcgtgtttataactttgaatcgctatatagtcgccttctttgggaatactcatcgacatacccagctttccaaggttattattcataatcatctatcattatagcaaagactcgcaaatttacctaaaactttctaccattaattggttgccaaacgtgccgctaacttcttttgcacagtcggtaatgcaacgtcagctaattgtgcctcggtataccattggcctgggaaaaaggcgaggtcggcatctgctgcaagttgtgcttctaaaagggtaattgtccatttaagatgcgtaaaaacgtgcaccacaggttttaaacctgattcatgtaattgctgcaattctagtgcaaaagcctctttaaaataagtttcgatacgagctaattgttcttccggtgtcaataattcatcgtcagttacttgcaagtcttccgcagcgactagtggataagtggacaggttcgctaataaaccggtactcggtcgtttttgaaataataagcccttttgcgagcgaatcacaactgcaaacatcgcaaccggtttttgttttgctttcttcgtcttgactggataatccaataaggtgccatcttgataactccggaaaaacggtgctaacgccgtctcaccaaccgttggattctttgccgtacaaacttgcgagccaaaatccatcacggcttggttaaagtcacctgggcgatctttgggaatcagcggtaaaatcgcatcgtaaaaaatgtggcggttctttgggttggcaatatcagcatcgattttcaataaccgactgaacacccgaaaagcattgccatcgattgccgggacgacttcgccaaaacaaatactggcgatagcgcccgctgtgtacggtccaatcccggctaacttttctaattcagccgcggttgttggccactgaccattgtaatcgtcgacgacttggcgcgctgctttttgtaagttacgcgcgcgcgaataataaccaagtccctcccacgttttcattaataagtcctctggagcggccgctaagtctgccaccgttggaaaagtcgccaaaaaccgttcatagtacggaatcactgtttgaacctgcgtttgctggagcatgatttcagatagccagacacgatagggctcttgattctggcgccaaggcaagtcccggcgattttcatcataccaagtcataaacgcggtttgaaacgcgccccgttcactcggtgtcatctgatagttcttgttcgtcgatgaagtggttgattgcatcaatattaaatcctttccgatacaacgcttgttgcatcttcatccggcgttctcgtggttcgagtaatcgataacggcgccatttttttgcaccaagttcagcaagcgcgtcagcttcactatcttcatcggcttcaagggccaacgcttcaataattaaactaaggctgtcaccgccaaaccctttttgcattaaaccttgtttgactttttgctgctgttcaaagaatgaactatgacggtatttcttcgccaacttcttagcagctgctaacccaaccgcaacttgatcatccactgaataatgactaagtgcttgatcgatatgggcagcactaacgcctttttggattaatttctggcggaccactttggggcccttatccgcggtattaatcacagtacgaacgtagctatcggcgtaatcctgatcgtcgatataatgtaactcgcgtagttttgccaagctagtctggatcccttctggagtgatctcgtgttcgcgtaaatattgcgttagttccttttccgtccgcaattggtgactcagataattgagcgccaattgatacgctttggcattatcatcgtctttttgaatgtcgcgttgcagttgactatcaatctctaaatcctttgctaaacggtatttaatcaagacactctcggtcacgccgaaagcgaattgctcatcgataaaaatattataacggcctgattttttctgtgccgttattttggtaatcttcggcatgttattctcccttgttacgtgttgctttgatgtttaaatagactttaaatccaatgaccacgacggcgagcactaaagtcccgatgatcagtggtaagctcttgtgttggaaggcataaacgccaattccgagtacaatcagcatggcgattaaaaattgatttcgttcccaaaaattcatgtggcttcgctccttactttgacttcctgtagcatagcataaatggcgcacccggacaaaagtcactgcttaattcccactattgaagcgatttttcagtgctaagtctgttatactgaatgcaatgagaaaaacgagtatcattattttatattaataggagcggattaaatgccagaacaaacaaaccaagtcgaagtcggccaacgttttccattgacgattaaacgaatcggcatcaatggtgaagggattggctattacaaacgcaaaattgtctttattccaggcgcacttcctgaagaagtggttgtcgcagaagtcaccaacgttgcccctcgtttcattgaagcaaaagtccacaaacttcgccaagcttcaccacaacgggttacccctaaggatgccacttacggccaagtcggtgggattgagcttgaacacttaagctatcctggccaacttgccttcaaaaaagacgtcgtcgtccaagcgcttgaaaaattcaaaccacaaggctacgccaaatacaatattaccgatacagtcggaatggaaaacccctggcattatcgcaacaaagcacaattccaagtccgcgaaatcgacggtcatttagcagctggcttatacgctccaagtagccatactttaattgatttgcctgaattcgcaacccaaaccgatttaacaatgaaaatcatccgaaccgtcttgaaattagtcgaatcactcggaattcccgtctttgatgaaactaagaatgccgggattttaaaaacattggtcgttcgcgaatctttttcaaccggtgaagcgcaactgaccttcattaccaactcccctaaactaccgcaaaagcacgccttgattacagccatccaagctgaattgcccgaagtggtttcaatcatgcaaaatatcaacaaagggaaaaacgtgctcgtttggggcgaccaaacgattcatctggctggtcaagaaacgattatggaaactttaaacggcgttcacttcgaattgactgcccgcgcctttttccaattgaacccagttcaaacggctaagatgtataacttagttcaagatgcacttgatctcacacctgaagatcgcctcgtcgatgcttattgtggggtgggtacaattggcttgagtcttgccaatcaagtcgcagaagtacgcggcatggacacgattgccgattcaattgaagcggctaaacacaacgcagccatcaatgacattcaaaacgttgaatatgccgtaggggctgccgaagacctcctcccagaatggttggataatggctttgtcccaactgccttggtggttgacccaccacgcactggcttagatcaaaaattaattgatgccattttagacagtcggccattgaaatttgtctacgtctcatgtaatccatcaacccttgcacgggatttaaaagcccttgtgcatacgtaccaagtggaaaaaatccaaccattggacatgttcccccaaacggcacgagttgaagcagttgtgacattaacactaaaacgcgacctataacgcaaaaaagcggtccatcaacatgtgtttgttgatggaccgcttttttatttggactttaatcgcctaaacgtgttctataagtcatatccttccggttaaccctgaatggcaaacgattgcttcacaatcattcgccaaacttcgttaatgctcagaccgtttcggttgtgacgcactctttcttaagaagaaagcaactagtggattgtcgctgttggttgtaatcgtgtctgttttcaataacgtgattataaataaagttaaaccgatcaacgccgaaattaacgtccatgcgcgcccctgattgcccgatgtaaaacgggatgcaaacccgttcaataaccacaatacaactgctccgcgaccatttaacccagcatcccgataacgccgtacactaagcgccaacgttggaataaacgtgagtaccccaagcaacccgataacgattatgtacagcactaatgcaccgctcatcttcagttgcacctttgcagcttgtgcaaatagcaaagcgaaaaatggcatgaaccaaacaatcattaaaatcaacatcgcccaccaataacccgcacgtgttgttcgccccgtaaaatcaaaataacctttaaaataatctcgccaagctgacttaaacgttacttgccctggtgtttcttgaatctcgcgcattgtgaatccccttccaaaactgattaacttaattgtacagcatttcaccactaatttgatacaataaaggaaatcaacttggaggaattcttatgaaaatttatttcgcaaacgctctattctcagcagcagactttgattataacgctaaggttgttgctcaactgcgccaatcgattcctggtgtcgatatctatctcccacaagaaaacgccgcaattaatgacaagaatgcttatgccagctctgaaatgatcgcacaagccgatacagacgaactcgttgctagcgatctcgtcattgctgttttggatggtcccaccatcgatgttggcgttgctagtgaaatcggtgtggcatacggtcgccaaattccaatgatcggattatacaccgacagccgccaacaaggtgctacaaatccacaaaaactagcggctttacaagagatcgccgaaaaccaattccattacttaaacctttacacaaccggcttaattaaacaaaacggcacgattgtgaataatttagacgcgttgattgaggcagtgcaagcccacgcctaattaaaaataaagccattcatttgttatctatagtgaatggctatttatattgtattttgagcataaaaaaaaggattcaagctttgatatgcttgaatcccctaggttgaggttgatagcttggttgttacgagctgattctgttttacattctggataatgttacacctcatactttattcaattgtttttaatcgttggtctagcccactgctaatcgtttcactcgatctagtttggtcgtctatctttgacccgcatgtgcagttttagcgatgacgattaaattcgtgtttactacttgagcgatattctttaacagacatcagcctccgatatacttagatcttaatactacgaagagttacacttatgtttccattggaaccacgccttgcaatttctttttcgtactttaaatcttgatgtgtcgtacattcaaatctggtgcttgtgttttaaagtggtaaatctatttaaagctaacttggtttcacttaccaagctatctttcctcaccattaatatagcaccttctgtgaccggatacaatcaaaatgctcttaaatttaaaaaagtttttccatcatttctgacttgttatttttatcagaaatagctaaaaaaactgccattaacaatactgttaatggcagtttttaggatacatagctgttttttattaatctctaacttgataattgcgttcgtgttccttaacaccttttaaaatgattgacgcgttgtccattgccaaatcaatttcatattcgctaccgtcttctggtagttctgcttggaattgattttcgtattcagccatcgtcaattgacgtcgtgcagcaagcattgctttgtggtccgcaccggctaattgtttttcaaatccgggttgcaaaataccggtgaagaattcactgatcgcacctgaaccgtaactgaataaaccaattcgatcgccggctgccaattgcgttgattgttccaataatgaaaggaagcctaggtataacgcaccggtgtagatattaccaatttgacggctatacaatgtactttcttgataacggtctaataaatgtgcttgttctgcttccgttgctcctggcaggattgtccgcaatgccttcaaacccatctttgtgtatggtaaatggaacgttaaggctttgaaatctgaaattgtgcggccagtttgagcgcgatagtctgcccaagttgcttggaaaaattcgatgtattgttcagttgaatatttgccacgcgcaaaagcttcttttgaatagttggggcgccagaaatcttgaatgtcatcactgtggatggccgttgccggttctaacgccaacaaacgtggtgctgcactaacgatcattgcaaccgcgccggcaccttgtgtcacttcacctggtgtatccagcccataacgggcaatgtcagaaccgatgactaatgctttttgctctggatgtgccgctacaaagtcataagcggtcatcaaaccagcggttgcaccgtaacaagcttctttaatttcaaaagcacgggcattttttaatcctaataagcgttgtacataaagggcgccggcttttgactgatcgattcctgattcagtgcctaaaattaataaaccaattgaatcacgattatcatcatccaacacttcaagagccgcgttagccgccattgtgacactgtcttgactgaggggggcaattgccatttgatcttgaccaattccaattgtgtatttgtcaggatcaacgcctcgcgcgttagctagcatcactaaatctaagtaggtattaggcgtaaaaaggcccatcttatcaattccgatttgcataataaacttccaatctatttgttttcagcacgcagttgcgctaacagctcggttgctgttgctgtatttaaatgtgtcgctttcaataataatggtaataattgcgttaattcagtctcggttgcgccagcggcaatcgccaacgacttcgcttgaagcgccatgtgtcctttttgaatcccgtctgacacaagtgctttgagcgcggcaaaattttgtgctaagccaacagctgcgataatgccggctaattcacgcgcattctgaacttttaacaagcgctgattaatctgcacggttggtagaataccaatcgatccgccaaccatcccaactggcagtggcagttcgattcgaccgcgtagttgctgatcagttgtccattcccaactcgaaagcggttgataagcaccctttctagcagcataactatgcacgccggcttcaattgcgcgccaatcgttgcccgtcgctaacaccactgcatcgatgccgttcataatccctttattgtgggttgctgcgcgcgccacatccactttggcaaagtcactcgccgcaatcatcttttcggcaattgtttcgccagcaagcgtcgcagttgttaaggtagctggatcaatcgtcacacttgcggtcaccacggattcaaacgcggcattggtcaaaacactcaataaaaggttgccgcccaactgttcttgcacagcatgtgcgatcgcttcacagattgtgttcacaatgttggcacccatcgcttctttggtatcaatttgcaattcaagtttcaaaaagcggtcgtcaataatcgtcggcgtgattttttgaagaccaccaccgcgtttaacaattgatggatgcgcagcccgtgcaacttcaaataaatggtcattgttgccactaatccaagctttagccgctactaagtcaactagcttctctaacacgacttcaccagtcatcagccgcgtcagttgttcagtcacaaagccgccattagctcgtgccatcttagccgcattattagccgccgcgataacggatggttcttcgatcgcaaacgggacttgatagacttgctgattgactaataaatcttgcaccacaccaagcggtacttggtactggccaatttggttttcaatcatattaccagcgatctcatctgacaagggttctgcagctgctaaacaatcagcatccgtctgacttaggtgaccttgttcaacaagcgttgctaaacgttcatccttcgttaattgatagaacttaggctttttcattacaccatgcctcatttaattgaatttcaaaagcaattcctaacccgccaccaatacataacgaagcaatccctgttgtttggtgcgtccgtttcaattggtgtattaacgttgtcatgatgcgcgtgcctgaagcaccgattggatggcccaacgcaatagcgccaccggccacattaactttagcaggatcgacttgtaacccattttgaacggccacacttgaagcggcaaacgcttcgttaatttccaataaatcgatatcggctaatgtttgattttgttgcgctaataatttttgaattgcatcgaccggcgtgtaccccatgtaatctggatcagcaccgacttcttgatagccgaccaaagtggcttggtaaactaatccgagtgcagcagctttttccttgctcataacgatcatggcagaagcgccatcgttaatgccggaagcattggcaggtgttacagtcccatcttgttgaaaagctgggcgcaacttcgccattgcttcgatggttgtcgttgggcggataccttcatcttgttgtacttcaagcgttgctttgcgttgttgcaccgttacaggtacaatttcttcattaaaccaaccagcttgggtcgcttgcgcggctttttgatgagaagcgagtgcaaaagcgtcttgcatttcacgcgtaacgccgtatttagctgctacattttcgcctgtaatccccattggctggtgcgtaaacgcatcgtttaacccttcgctactgatgctatcaatcattgtttgatccccaaatttactcccaaaacgcatttgtttattcaaataaggcgcttgtgacatactttctgtaccgccaactaagacgatgtcagcatcgcccatgacgattgcactctgcgccaaccgaattgcttttaggccggagccacaaacttcattaactgtcattgctgtgcttgattgtgtcatcccactcttcaaagcgatttgccgtgcaacgttttgcccagaaccggcttgtaagacattcccgaaaattgcttgatcaatctgagttggatcaatcccggctgcttcaatcgccgctttagcagcaactgtccccaattcaaccgcgcttaaacttgcaagttggccccccaatttaccaatcggtgtccgctttgcactgataataaccacttcttgcataatatccctcttcatctataagtctaattattactataactaaattttcatgaaacgtctggtaattcacaatttctttaacttttttttagaaatccgcttggtaagctgagattattttaccattttatcggcatcgtgcattactcattagcgtaagtcattcaccggtgacgcttacaactaatctttaggaggaatccacatgcaaacatcatggttagcaacatcgatcgcttttgaattacaaaatacagactatccaaatgaaagtttacaacgtcgtatgaccgccgtaaaagaagacgttcaagccacggaaatccaaacagttggcgaagccctcgcaagtctccacgcaggtgacacatttgcaacagctactctaaccactaaatccgcttatatcgctaaataaaaaacataccaatctttgaggaggaattcaagatgaaacaactttgcttagaatttaaaaacagtgatgctaagagtcgtgtattgcgcttaaacaatattgatgacaacttagacgccgaaacagttagaagtgcgatgactaaaatcgcagcagccaatatgtttattaaaaaaggaattgaactctacaaagaaccagttggtgccaaatacgttgaacagattgaaacaccaatcttttctgacaaataattaagcagcatacagcccccaaatcgaatctgatttgggggcttttttttgcgttttacataaattgattaacaccccttgtttccgcgataaactttggtgtaggcttacataaagtcgttcaaaggagttatcatgcccaattcatttaacttatcgcaaatattgcaatcaatgttacttaattgtttactggtaattgcgctaccactagcttttgccgggattttaacactaatcaatcgttcaactaaacggcgcttagcccattggtgggattactcacaacttttaattggcggcctaggcaccgtgattcatgaactcagccatgctgttgcctgtttaatcttccaacaccaaattatcgatatgcaactcttaaaattaaatctacgggataatcccgatcactcgcttggccatgtcaatcaccgataccattccggccgtctttggccaacaattggtaatctctggattgggattgccccgatttttggttgttcagccgccattttcggactgacttggttattagcacggcccacttttgcaacgtggatgacctttgctgaacatcccacttggcagttaaacgccatcggtcccttattcagccagctctggacgacgcaaccgggtgctctcttgctctggttaatcttaactagcatgattgccatcggtggttatgacttatccgcagctgattttaaaggtacgattccagggattattgccacagtcattgcggtctgcctcgttactggtctgttttcatttgtgccaacagtcaacaccacgacttggctcattggtgttctaacaccaatggcaattatcctaaccatcgccgctagcttgtcgggtgtttgttggctgattattgccgggattttcgcactattagaaaggacgacttatcatgcgcgtcattgacttactacagctattagctgatacacccaaaaacgatggcatctacttcgaaggccctgaagagctccaacctatcgcccactttgagctcgccgtcgttgacgaacagccacgactattactgcagttaaaggccgcagacaaaaagccgctgaagcagtgggaatttagcctattattaaatcaaaaaaactactaccaacattatatgtatgtccaaacaaagacgggggactatcctttgtttggttttcgcgttgctgctgacaaaattctactcggataatgtttgttcaagttgcgttaaataacgatgactcgcaatcatttctcgtgcatcattttgatcggctaattgaatctcatagatcgaactggcatcaggatttaacaatggcaatacgcgggcccagtcaattttgccagtccctaattgcaacccatcatgcttcaaacccatcgaatcaaccagatgataatgaacaacgtgctcacgcaaagttgccagactctgcaagaaagcattctgatcaccctgcaacttgataaaacaatgactcgtatcaaacgctaagcggtaacctttatcaaagatggcctgatcaaaaatcggattgccataatagaaaatcggtgaaattgaattttcgaacataatattttgtccgccaatccgctgtaaataatcgaggcgcttgaacaaaacacgaatggcatccgtaatattactgtaacccgtcgtcaattcttcaattggatcatcataagagccatgcaccaatagttggacatcttcagctttcgctaactgcaataaatcgagtgttgattgccataaaaagcggtatcgggctggcgaacttgcttcattcatcgacagttcaatatgatgcccttcgaaactcattgggtggtgtaaaataatccgttcaacctgctgactgcgtacataacgaattttttcgcgtaagcgtactagcccatttggcgtgacatcttcggctgttaaatgaaattcaaaatacgttggctgatactgcattcgatcagcaatttgctgatcgttaatccctgcttttaagcctaaccgcatcgtaatccctcttttctctactagttcctatttctattctaacattctaaagacctaagaatcgtaaaagcggctcaccaagtaatggtgggccgcttttttggttggcgttaaacgtgctttttgaaacacacgctatgcatttagtaccttgttcaggaagtcttttgttctttcgttttgtggggtgtcaaagatttcctgtggtgtgccttgttcgacaatgtgtccatctgccatgaagatgacgcggtcggccacttctttggcaaagcccatttcgtgagtcacgacaaccatcgtcatcccttctttggctaaccgcttcataacggccaacacgtcgccgaccatttcaggatcgagcgctgatgttggttcgtcgaacaagagaatatcaggtttcatcgctaaggcacgcgcaatggcgacccgttgtttttgcccacctgatagcgattgtggttttgcatcgaatttctctgataaaccaaccgtttcaagtagtttcttggcggtttcttttgcttctgccggcgtcattttaccgagttccactggtgcgagtgtaatattttcagcgaccgttagatttttgaaaagattaaagtgttggaataccatcccgattttttcgcgaatttggttcaaatcactcttaggatcactgaggttgtacccatcaacgataatctcaccactcgtgggttcttctaagcgattcaagcagcgcaagaacgtgctctttcctgaacctgaggggccgatcatgacaaccacttcattatcaccgaccgttaagtccaaatcttttaacacttcgttactgccgtaattcttaataagatgagacacttcaattctattcattagttatctattctcccctcaatgtacttcgataaccacgtgagtaacgtgataacgatcagatagattaaggcaatcattgcccaaattttgaacccttcaaggttgcgggcgatgataattttacccgtctgtgtcaattcgagaatcccgatgattgataaaattgacgtatctttcaatgtgatgatgaattggttaatgaaggatggaatcataatgcggatcccttgtggtaacacaacgcgccgcattgctttaccatatggtaaccctaaactccgcgctgcttccatttgtccggtgctaaccgcgccaatgccccctttgacaaaggctgcagtataagccccttcattgaacatcagcgtgatgaccccagccacaatcgctggaatcttctgcccagttaaacttggaatcccagtatagatgaataatgcaagcaccaagaggggtaacccacggaaaatatagatgaccgtatctgaaacgctacgcgcaaaccggttaggtaatacgccgagtaatccgaagaaaaccccgaaaatcgttgcgaagaaaatcgcaatgactgttaataataacgtctggcctaaaccgctcaacaacgcatctttattttctttcaataatccaaaaaagctgtgatcaacggttgcttttttagttgattctgtacttaaatattttgctttaattttgtcgtattgaccatttgcttttaatttagcaagacctttattgaatttagcgatgagttcaggattgctccctttcttaacggcaaatccatattcgccaccttgagcaggtttggtgacaatcttgagtttcaagcccgtcttaatcccatattgcataacgggctcgtcttcaaaacaggctgccgaattaccattcacaacatcattatacatattatctgaatcatcaaacgtaacggtggtaaagccatattctttcgctttggccgtcgcataggccccagcggcagtccctgttttaatcgcaacacgtttaccgcgcaacccttctaagcctttaatcttactgtccttttgaacggccattacaaccccggtcttgtagtaaggatcagcgaaatcgaattttgcttgccgttcaggtgtaattgtcatcccggcaatcacgccgtcaatttgttccgactgaacggcttgaaccgctgcgttgaagcccaacggtttaatattcactttaaagccctcggacttcgcaactgccttcatgatatcaatatcaataccgacatattgattcttctcattcgcaaactcgaatggtggataggtcacatccgtaccgatttcataagttttttcagcggcttgaacctgattattcacttgactcccaaatacaaataagcctgcgagtaaacagctgcctaaaaatacgagtaatttcttcatgtgatcctcccttaatgcctgaccaacttctctcatcgctcttaacgcgttattaagattagattagacgttttataatagtatgttaataattataagcataaaatccaaatttgtcgaattttttaccacaatattgaaaagcagactctaatccctaaataatcgcattaaaaaagcccgcagataaggcggactttcactaaatgagaattgaatgagtttattttctgctataatggaagaactactactcaaggagtctactatgattaaacccattatgcgtgacacgcaattcttagctcaaaaagcagttccagcaacaccagctgataccgatgtgatgactgatttacgtgatactttacaagccaacacagaacgttgcgtcggaatggctgccaacatgattggcatcaataaacggattatcatcgttcaaatgggcgtcttacctgtgattcttgtgaatccacagattgtgcgccaagccaaaccttatcaaacgactgaaggctgcctctcattaaacggagaacgtccgacaacgcgttatgaaacaatcgaggtcacttatcaagaccaagccttcaaaccgcataggcgagctttctcaggctggattgctcagattatccaacatgaagtggatcactgtgagggccgtattatttaaaaaacaacaaaaaacgttcaaccattccaatgttcggagtggttgaacgttttttacaggttatttattttcttttttagtgtctttttttaattcttctgctaagtcgatgatgtatttcttcaaatcatctttcacttctgggtgttttaacccatattcgatacttgtttctaggtaaccgaacttgttcccaacatcgtaacgacggcctttgaattcatgggcgaagacgcgttgggtcttgttcaattcatcaatcgcatcggttaattgaatttcaccaccaagacccggtttttggttttctaaaatatcaaaaatttcaggcgttaacaggtaacgaccaatgattgctaaatcactaggtgccttatcaacagctggtttttcaacgaagttcttaacgttgtataaatcatctttaactttgttttctgggttaatcacgccgtatttgtccacttcattatgtggcaccttcataacggctaattgtgatgcatgtgtttcttcatattcattgattagttgtttactcaatggcaccttatcttccatcaagtcatcacctaacataacgataaaaggttcgtcagcaacgaatgattttgcaaggcgcactgcatcccctaatccgtttggatgtgattggcgaatgaagtacaagttaacccccatatcagtcgtttcgttgaccatcttcaacatagcggtcttattcttggctttcaagttttgttccaactctggtgctgaatcaaagtgatcttcaattgggcgtttgcctttaccagtgataattaagatatcttcaatccctgaagcctttgcttcttccacgataaattgaatcgttggtttatcaacaattggcaacatttccttcgccatcgctttggtagctggtaaaaaacgagtgcctaatccggctgctggaataactgctttacgtactttcatctactaaaatcccccataacatatagtctaataacagtatgccataaaaaagtggatttgcaccaattatatgccgaaaatgaggaaaagattaacaagcacttaggattttatcaatcttttcacaattgttttgtaagcgattcccatcattggtattctcaagaggttaacaataaaggaggtcttcgatgtttctactacatcccaaacatgtcaatacatcccatgaatgtcttcccgtgccactcatcatcaaacgtggtattgattataacttctgtgagctggatcaatcgtcaattccccgttcttaccaaactagtattacgagtgacacaatggtgattattccctataaaaaatcgcaaagtcttgtgttagaccgcataaccggtctccaaattagtccgcgttctacccggcaactaatgcgcgcttataatcgccatcagatcatggacttctcacaaccccggtacctttgccattgtttcaattggtatcgtaagattccacacatcaatggcgaatatcagtatttaccattaagtggcacggctcatcaaaacgcaccgtggttagcgctccactacgtccgtgattacgaagttagcgataaccatctctacgtgacattgctaaatgactgtacctgtatcctcccttataaaggccgtcaaatcgatactgaaattcatcaatgtgcagccattggcaaagtccaacttggctgtctcactgtgtgtgccactaatttcggctatcaaatcaagctcaagacttgtttcaagccaagcatcgtccatcgcttcgatgattgccattgccatctgtgctcgaatgttccgaaaacagctactgaactactcggattactcaacgcacttgaaatgcaaaaggaaaatttcatttaccaagccgtaatccatgaataccccgaattcagcgtatttgacattcagtgctatatcaaaagtgttaaagcactaattcaaaaattacgccaattataaattaacccgaagtcgctatttacaatagttttcatttgtatttcaatgcatttgcgcaaattaaagctgaaacggattgatttaccgctaaaatcggcgattacccttccttatgcaaacccgctatagtgaacttaccggtaattcacactgtgagctcatagtagacaggatgcttgacaatgacccgatcagatttacaaactgcctttgattttattacacaagacgacaccctcatctatggtgttctcaaagatctccacgttccacggcagcgcaataacttcgccgatctctaccaaattggcgtgattgcctttgtcgaagcctacgatcatttcccaggcaatattgaagtcgaaacccaccgcttcatggtttacgcgtatcaggctgttaaatgggcaattatgatgaccttccgcaaggataataaccacgacaagcgaatcggcttcgttaaccggataaacgatgatgattccgtgatggactacctcgaccaagtcgcagatccctactgcaacccagaagacgccgccatctgcaacgacctcttcgaacgcctctatcaagtctgtaccccacgcgaaaaacgcttcttagtcctccgctacttctacaacgccagcctaaaagaaatcgccgcagacttaaacatcacacggcgaacagccaataatattaaatttatggtgcaaaagaagtttagtgcgttattagtataattaaaaaaggtgagcaatcatatgattactcacctttttaattatactaatcgatttttgccataaatttttgtaatgcatcttgccaggttggtacttcaaatccagttgccttaatcttcgttaattagctaaaagtatttggctaacttgattataaaacgcgcgatttttatttggaggttcttattatgtttaatggtctattcaaagatctaacaccaaggtcgtttactggtactgcgtcgagttattattagtatcgtgggtctctgtgtcttttcagctttctttattatctttggtgctaaagtaacttttgaaattcttgcaatatttgctcgagatacgactacatttgtcactgtgttgctttacttgctttcattatttatttttttaatcgggttcaaaaccaagattactcaaattagtgttgttacagcttggattagtgaagtacagtttttatttttgttattctcgccaatttggcaaattcacgctggaagagaagttgcgttctatgttattttggctatgaggattctggtcacagtattactggcatttcttttgtatctatatcatcgcaacaataaagcaaatcgaaaataccgtcgataacttaatacaaaaaaataggctagcccttgagggactagcctatttgaatatcatcaataaaaatcgcgttcaaattgcattaaatcattgattaaagacgctgcttgcttcaattcagcatctttatatttttcggtcaccttatcaataacttgcgctttcagcgtttcatgcattttatcgtggctttgcgcaatcacacggcctttagcggtcaaagaataatagatttttttctgatcatctggttttttagtcgcttgaattaagcccatttgaatcaacttcttagcggcgcgtgtaatgccgccacgcgtaaccgccaaccgatccgctagtgctacacctgttaattcttcggcctctaatcctgataatatgtgcaatgcaatgattgatagctgcggaatcatcgttttcaagttctcatcactcagctgattttgcaaccatttttgttcttgaacaccgcggccgttgacactatctgagcgtaattgcttgattgcatgatagagtgccatcactgattcgttttccatttgcttaacctctcatcaattgttaccaccagtatacaccaaattagaatactttagctttggtcgtcgcttccgttagggcccgtgctaatatttgttcacgttgatctgcatgagcatccgcgccttcaatatagacgtgttcaacttgattaacaccatagaatttcaacatattggttaaatacatatcgcctaaatccataagtgcagaactttcgttactcttaatcttaaataaacggcggaacaagaacttaacgatcccccacttgcccccagcgtgataaacactgccagctgcttggatatggattgctttcttaccttctaacaaacctactgaaccgttcggtgtgtatttgaatgttttgtgggcgaccgccgtcaaatctaaatattgtttcatctcagctggtaaaaaatgattgtacattggattgatgaagacatatttatcagcttcgataaattcatctaaccaatctgcgtgttgttgtaatagtgttttctcagcttcagccattggttcgtcaaatttttgtttacgccatgcagccattgtcatatcgttcaatggtggaacacccgcttcagtatatagatctcgaataataatttgatcatcaggatgggtccgacgataagtttctacaaagcgggtccctaccgctagggataaactcttttcaacatggggatgtgcttggattactaataatgtactcatttaaaaaaaccttctttagtttcgtttagttgcttgtcaacaaaataaagattatcatcgttttagttgcttgtcaacaaaatgttttaaattaccgttagctatcaaatttagctgaagtgccctagtagcgccctaacgtgtcatttttaagcaaaaaaaataggctatcccttgagggactagcctatttgtgtaagcttattaaacatgctttttaaagctgactcctgcgcttagctacaatccgcaaacaatcgactaacgtcgattattcacgaatttaggctaatgctcagaatcaacccgctttaaacacactctttaataattagtttaatttcttcttgcttactacgtttaagttttcgtctaaatcataaacaactggttcgcctgttgccatttcaacgtccatgatgtcttcatcagagatgttttcgatgtattttgttaaggcgcgtagtgagttaccgtgagcggctacaatgatattttggccgtcgattaattttggagcgatttcgtcttcccagaatgggataacacgttccaaagtaaccttcaagttttcgccaccaggaattgcttttggatctaagtgtgcgtaacgacggtcgtttgctgctgaaccttcatcacttgcatccaatagtggaggaagtgtgtcgtatgaacgacgccagatgtgaacttgttcgtcgccccatttttcagctgcttcagctttgttttgaccttgtaatgcaccataatgacgttcgtttaagcgccatgatttcatttctggaacccataattgatctgaaccttcaagtgcatagtgtaatgtcttgatggcacgagtcaatactgatgtgtaagcttggtcaaaaaggatgccttcttttttcaataaagcaccagcgttttgagcttggcgtacgccttcttcgcttaagttaacatcaacccaaccagtgaattggtttgataagttccattcactttgtccgtgacgaataaaaactaatttagccatgtgtaagtaacctcactttttttatttttactctgttcattttacactgtttgctacacaatttacagtcttatcttttcagaaaataatgaaccttctttttttatgctcgatcagtcgttttcgtttctttcaataagaaaagcgccgccaagatggcaatcaccatgagcactagcgacgtcgttacaacagcgatcatccctttatcaaaagccgtgacaacaatttgttggacctttgcggcatacggtgtcttcactaattgttgcccccacgcgattgcatgtcctgaaaaagcacctgcttcaaccaatgcttgctgaatgccagttgctgccgccttcgggattgagctaccactaaagccagtcttcaaactcgtttcgtaggcattcgtttgtgataaaccgagaatcacaacaccgacggtaattccaatttggcggaaaacattcaataaaccggatgccattccgatttcttgaggattaatattatccatcgccgctgtattgatcattggattgataatcgcattgcctaacccagttagcgcaagcaatggtaagagttgcatataagtaaaatcagtcgttgtcacttgtctaaaaattaataaaccaagggcagaaacagtaaatccaaaagcaatcaaccattttttaccgaatttatagcctagaacacccgtgaatggtcctaaaacaagggaccataaactcattggcagttgatgcacaccggttgaaaaggctgagtaacccatgtaattttgcatcaaactcgtttgataagcggctaaggcaaaaatgccagcgcctaatgagaaagctaaaatcacaacacccacgaaatggcgattcgtaagtaacgtcaagttcatcattggtgcttttgctttcaattccacaaagacgaaaagcgctaaaattaaaacggaagcgactaaccaccccataatgcgcatatctgtccaagcccagtgcatatgttgttctttttgaatcaacccataaatcccggaaaataaactaattgctgacaagatcatccccataaaatcgattgattcgcccgcgccataagctggtgtttctttaacattgcgaatcactaagtaaactgaaataatcccgactggtaaattgacgaaaaagatggatggccagccgaagttttcgactaaaaagccccctactaagggtccaatagcagttgaaaaaccaatcacggagcctaaaatccccagtgcagtcccccgttcgcgcccttcaaagttcgacgccactagtgccatcgataaactcatcatacccgagccaccaatcgcttggaccgcgcgcccgatatctaataccaataaatttggtgccagtccattaacgacagaggccgctgtgaataaaatcatactcatgataaaaattttcttgcgcccgaacatgtcccctaatttggaaacaatcaacaagctgaccgcgtacatcaacgtataagcgttcaaaacccattgtaagttgctaaaagttgttttaaaatcaatcgccatacttggtaaagcgacattgacgacagttacgtctagcaatcccataaagacacccagactcatcgcgaccagcgctatccagcggttggttgtttttttcattttactatctccattttctctatctcatttatttgtgcttgtagccaatccattttggctttgatcgttgtgattacgaaatcggttgaacgaatctgccaataataataatccgtcattgtctcatccgcatcttttaattcagttagatgtttttccacaccgctataaacatgtaaatcttcagccaactcactgtagaaatcttgtaaaatgctgacttgttctgctgcatcaatgtagtgcatcccacgcatcttaaagcgataagcatcatcccacttcgcatcatgaacgactggtttagccattaattcagcaaaatagcgccgtccctcttcagtaatgtgcgcaatcttcgtaccacgtgaatcctgatcagcttcctcaaacccaatgcagcctttgctttccaatttatctaacaacggatacaaaaccccatttgaaattttccgtctgggcaccatcgcattttccaagataatccgcaacttatagcccgacatattccggctcattaaggcggataacatcagcaattcatacataaacgcataacctctctctttaatcagtcttttagacaggtctttaagacttattaagtatagttctttccgacatatttacaagcctttttttcatttttagacaaataaaaaaacatgatccgcataagttgcctgataacaaggcttcatgcggatcacgcttttatggatttagggatgtataggttgtacactctctctttcaactaattcaattgaaagtactttttgttgtggcgcaatagcaggctccacaatccggttcaataatagacgtgttgcttcttgcccaagctcgaaaatcggttgcttaatggtcgtcaattttggtgtgacatattcacaccaatcgatgttatcatagccaatcactgagatatcttctggcacctgtactcgtaattcacgtaacccacgaatcaatccgatagcgagttcatcattgattgcaaatacagcagttaccccgctatcaatcacctgtcgtgcaacttggtaaccacctaatttcgttaacggtgtcgttatttgccactcatccgccactggtaattgggctttcaacatcgcggcttgataaccaatgaatcgttgttcgatgttccaagctcgttgttctggtaaaacaattccgactttatgatggcctcgttcaatgagataccgtgcggccaactctccaccttgcgtatcggcaaccgtaatttcatctcccgcatgttgtttatctgattgatctaataagataaacgggatttgtcgtttttgcagatagctatccaacgttgttttttgtaaatgagggacagccaaaataaagccgtcaacatttcgacgaaccaattcctttaaataatgatcaactttctgattatgcgcccctgcactataaattaatgggatgaaatcgaattgataggcaatttcttcgacaccttgaataaactgactaaaaaaaggattattgatatccggcaccaataccgcgatcgtcttcgtttctttattaatcatattttgcgcgaaataatcaggttcatactgaagtctttcccgagcggctttgacccgcgcaatcgtttctgcgctaaagcgctcacctttattattaagaattaacgaaactgttgtgaccgatgtttgcgccagcgcggcaacatctttaatcgttacttttcgaaccattttggcactcccccgaatcaaattaataaaaacacccacagccggctagccatggacgctgttaatatgattataactgaatatccttttcataaggaatcgaattttgcgcccctttagtttggactgcaatcgaagaagccttattggcataagtcattgctgcttcaatgttactgtaatccaattcaagtttcgtacttaaagcaccgataaaggtatcaccagcagcggttgtatcgactgcttgaactttaaatgccggtacaaacccggttgttgttggtgttgcatagaatgagccctttgccccaaccgtaatgataacgactttaatccccatcttaaacatcgcttccacgttagctttcattgatgcttcgtcagtcactttaatccctgtgataatttcagcttccgtttcattagggacaatcatgtccgtcactgccaataattcagctggaatatttttaatcgctggtgcagggttcaaaatcgtttgaacgccgtttgaacgggcaattttgaaagcttcaataattgcaggaataggtacttcgaattgagcgacaattctgtcagcatctttgatggcttcttcggcttcatgaatatcatcgactgtcacatcttggttggccccaccatagattaaaatactattttgtccactagcatccaccatgatgtaagcttggccagtcccagctgtttcagaacaacgaacgtgatcaatgttcatgccatcttttttgaacgtatctagcatgaaatcagcggcgccttccttaccaaccttactaatgaaagctgtttgcgcacctgaccgaacagctgcgattgcttggtttgcacccttaccaccaccagcaactgcgcggccatccattgctaatgtttcacctggttgtggaaaacgctgaacgtttaaaattgtgtcgacatttgttgaccctaatacgattacttttttcatttgaaagccctcctaatggttaaaatacaacgccactttctaaaataatgttggaataaggtgtcatttcacccgtgcgaacaaatgctttggcctgccccaagtcctgtttcatttgtgcgtgatcaataaattcaatgggcgtctcaccaatcacttttttgatttgttcaagttgtgctggattagctgttttaatttcgtttgctaagtaaactttttgaatttccaattctgttagaacatttttaagtacttgaataaaacttggtacaccattttcgatggccacatcgattttttgcgttccagctgggaccggcatcccagcatcgccaatactcattgtatcaaaatgtcccatgtttgaaatcacatttgaaatttgtgaattgataacttgtgtttttcgcataataaatccgccccactttttatttgataaaggctgtcacagatccagccactaatacgagtactaaaccaattaatacggcaaccatttcttttttagtcttttgttctttcaacacataaatcccaccgattgtggcgaaaatgacactggtttgggataaaacaaaccccgttgctaagccattcacagaaggttgtgctgagataagatacgtcagcgctgcaaacgcgaagaagaacccactgaagatattcttatacgaagttgcttctttgaaaggttgataagtcttgctggtttgggttaatccgaagataacacctacaattgccattcctaatgcttgtggcaaaaagccttggaaaccgtccgcgtgtattgcttgtggaaaggcggagtaccctaggtagcctagttcgccaactaataataacaagatgccacgcaccgcgccatttttactagcgcttgaacgatcttcactccaggctgttaaataaacaccaaggataattagaataatcgctgtgaacccaatcaacttcgattgtgtacttgcccagttacccaagatgaagacgccccacaaagatgccccaacaagttggaacccagttgtgattggcatcgttctagaaacacccatggtttcaaaaacatgaaaggtgataatctgcgctaatgcccaacaagcccctgaaattaaacaaaaaataaatgttttggtttctggaatcggtgtcccgcggaaaatagccacaataatggccagaattaatgtcccaagtgtcgttccaataatttgactcgctggtttcccaccaattttaccaacgatcacagggaacaatccccaaccaatcatcggcattaatccaattaagatattgacagcattcatattcaatcctccgtcctttattctaggctagtaaaacgttttactaactatcatggtgattattataaaggagcttctttgagaattcaactcttttttgtaaccgctttattaaagaacacaaaaaagattaatctggcgcgcatttggcctgattaatctttttttaatttattttttcttgcttgtccgtatcctcgtttagatttataacctgcatctaaaatttgacacatttcaacataatgtcgttgctgtgtttcttcagctttagcgccgtaaacataacgtgcccattcgcgttgatagcctggtgttagtgcgtcgaaaaaggtttttgtggctggtgtatcttctaatcgagcactcaatcggggaatctcaacttcatattctgatagtggtttttgtggcatggtgcataactcccttattttaaccgcataacatctctggcaatcatcaactcttcattagttggcacaatcaggaccttaacgcgtgattgatcactgctgataatgcgttcttggctgcggacattatttttatcttcatccaattctacaccaaaacaagcgagttgttcacaaatggcagcccgtaattcactgccgttctcaccactaccggcagtaaagaccagcgtatctactccattcattaaagctacgtaagaaccgacatacttcacaactcgattgacaaaaatatcaagcgccaattgggattgtggtcgtgagtcagcggtttcttctaaatcacgcatatccggtgatagttcagaaatccctaataagccagacttatggttcaaaattgtgatcatctctggcattgtcttacctaatttttcagctaaaaaggctactaatgagacatcaatatcaccagatcgcgtgcccatcgtaatccccgcaagtggtgtgaaccccattgatgtatcgacagcgtgcccgtcttgaatcgcggtaattgatgcaccactgcccaagtgcaacgtgatcattttttgcgtttcaagcggctgatctagcatttcagccgctcgatgggcaacaaaccgatgactggtcccatgcgcaccgtatttacgggccccatacttttcataatacgcttgcggaatactgtataaatagttttcggcaggtaacgtactgtaaaatgacgtgtcaaaaacagccacttccggtacgcctggcaataatgcagtgaaaattttaatgtaataagcttgggttggattatgcaacggtgcatattcagccaaacgattaatctcattgagcccaaccggattaattactgcagagtccttgaaggcttctccaccagcaaccacccggtgaccaacccccgtaatctcatcgagatgggttacgatatttaattccttcaaccgcgttaataataacgttgctgcttgttcgtgcgtcgtaatatcttggacttgtttaaacttttcctgattgccatacttcactgtgaatacagaatcagataagcctaaccgatcaatcattcctttagcgattactcgttcagacggcatttcaaataattgccacttcagtgttgaactacctgcattaatagccagaattttttccatgatatcgactcccactctttcataatccgttcatggcttaattgtaagcaatttcataaaaagaaacaagccctattatatcagagtgcgtcatcaacgggtaacttctgagcatttatctaacttagcgaattggcgatgcaatcgccgatttgataagtgtagcaaagcacaggaagttattgatgaaagcacgtttaaggcaagaatgcatttggttgcggtcagcaactgagcattaatacaaactagcgcttaatctcgattttaagattaagtgctagtttagattaagcggaagttgttgcaaccaaaaagcacgttttatccataaaaaaagaaccgcccccacgcggttcttcctatttcataataactattctgcactttcttcgttcattttctttactttatttaggaatgaacggcccatcttgttatcttggtattcacttggttcaatgacatctaaatagaattgatcaatgaatcgaatcaaaccatcgactttatcacggcccatttgtgcttcgatttcacggtatttttcaacatagcggctcaccaaccggtctaaaacgtcttgaccttgtttagttaagctcaaaaatttaacccgttgatctgtttgaagatgttcttcaaccacgtacccattttctttcagtaaccgacattggcgtgaaattgctgaacgactaacactcatcgtcttagctaacttactacctgttaagttttcgttagttgaaatttcgtacataattaaaaattggtcaaaagaaactttgtaatttaaactttctccactgacaaagtcgcttaaattgctgacaatccaccgataaatcaatgaaagatgcgttactacttcccaatcatcagaatacttgcttgttgcttttgctgtcataaccttttctccctttactaaccgatctgtcatgcgtagaaacaattaacggatttaatttattttgctatcaatatattagcatattttgagagaaaagaaaccactcgattcattaaatagctataaatagatttgatgtgcaacaattcaattgaccatataatcatcaacccactatattagtttgtcgtgactatataaaaagaagtcattaaagataaaattattttcatccttaataacttcttttaataacatcttataggttacgatccatattgaacgtcaatttcgataaattaatgcccgacataacgagttccccaatcatcgaggtcgcttcagtcgccatctgcttaacaatcgcatggttttgctcagtcaaatactccgttaaggcagcgccttgatacttttgtgcttccacttgaatggcttcaatcatcgttcgcaattcttgcttacaacggtttaagtaatctacattgccttgaatgtgctggctataatggccttccaccaatactgaaattgtccggtataaccaatatgcactcttcatatcccatttcattggtgtttcgctgaaacttagatccgtatcgttcgcattcgtgaaaaatggaatgaacggtgtatacgttggcatccccattgtgatccacatgatggccgcttgttcctttggcacatcattccgtaattgtaaaatatgtgcattttgcgtccgattcaaaccgattgggcggtaacgatacttgtcggcatcagtcccatgccccattggatcgaatggcgtttcattataatgtgagcctaacaacatttcaatatcttcaacactaattttatgttcaatacgccgaataaatggtaattcagccgattcgggtgacatatcaaaatcagcatcaaataaatgatgggcgtaccaaacccgtggtgtattatagtgccggtctttttcattcatcgtgccaaaaatgtggcggaaattccagcccgttttatccggattcaaatgatgggcttcaacgtattcttgaatgccttctgcccacataaaattgtcggcatccgtgaaatcaacttgttgaatcgccacttggttggcggcaactgcataagcatcatctggaatccgttgtgctagccataaatgccctgtcacaatttccatataccacacttcattgtgatcactaaagagcacactattgccggcgggtgagccgtattgtttaatcaaattaccgagatagctgaccccttcgcgcgccgagttaatgtacggcgcaaccatagcttgcatgcaatcttcatccaacccgtctttcaccaatggatcataagcgagggctttttcatttccatatgtactttcggtacagctcatcgccacgttaacttcgttaatactactttcatcataataaccattatgtttgtaatcaacattcggaacagcgggccatcggtagccattctcaggtaattcggcttcaaacccgtttaaccaagatttaattttagcacccttacgccctttaacagctggattgatgtgaaaccgttgtggtgttaaaggtaaaaaagtatcgtcgttacgcgcaatcatcgttgatccgtccaatgatgcgtttttaccaactaaaattgatgtacatgctgattccataagttgcactccctctgatgaccactttaattgaactcatcggtcacgtttgattaaaattttctcataattaatatccatagtgtacgcttctcacttgcgaaagtatagcctgattttttgattaatttcctttaacccccgcatttattgcgatttctatacaatattggatttcacgttaatttccgatttcggaattatcgtcaaacgaccatgttagcgctcctaatttcatgatatattattagatgaataactaacaacaaggtggtttctcaatgaaaaaattaacacttgctctgttgctgaccatgaccagctgtttcatgattctagctggctgtcagaataaaacagaaattccagctgccgcaactaaaacagaagaaaaaattgatcaatacgtccaaaaagtgaaccaactctatagtgatggttcccgtaaagatcctgcgaagttaacagccaataaacaacaccaaattatcactgcggctgacaaactcgacaaacaaatcacgcccaacctttatatgagcggaattagcgctgatgcaaaggctgattacaaggctgcccaaaaagatctagataagattactggtaagcaaccagcaactagtgaatctgaaagtgttgcttctgaaaagcctgctaaaaagaagaaaaagaacaaagttaaaacaagcgcctttttcgataaagatgggattgtcaaagccgatgcacaacttggtgaagaaacggactataccgaccaccccaaacaacttgctgattatcaagaagctaaaaatcaattagcggctatggcagctgtccggaacttatttacagacgacaacctcaagcatattccagctaacctatctgctagcgacttcccttacgtccgagctttgattaataaatcaacccatgacggctttaaagaaaagtacttggcgtatgttaagaacgctgaaaatcaatacaacacttactctaacaatacccaagcggcaaccacgcaaaacacaacaaccgctaatcaagcaacaactaaccaaaacacagctaccaatacacaaactacgacaggctatgctgctaacacggcaacggggaatggcactggtgcaacaactggaactgggacggggacttcgacaacggataccacaaccggaaccgggacgactggtacacaaagtaatactcagaccggtacagatcagacacaaaccggtacactccaataatcttaagacacttcctaaaaagtacgctatcttcttgatatgcgtacttttttgacgttcgcttacgtttagtcttttaatcgccgatatcttaagaaacatgtaacagcgcgctaactattatgtaacatgtttgttactttcagatgctatgctaatcagcgtactaaattaattcaaaattcaaacaacttaaaaaatttttcgaaggagcacaacaaacgcatgaaaaaacaaaaaatgacttacttatcttctggaatggttggccttgccggcttagtattgatgggtcttcaaacaaatgatgcccaagctgcaacaaatggtacggttaactacgctgacggggcaacaaccgtttggactagcccagcagtaggtcaaaaacctgctcgttacttggcaactaaccaacaagtaacaatccaagacacaaaacaagtttacggccaaacatggtacaaacttggtaatgacgaatgggtttcaagccaattcattacagccggcgatgcaactgctcaaccagctgcaacaacaaccgctgttaagaacacagtaacagctaacttccaatcaggtgcaacaactgtttgggctgacacaactgctgctcaaccaactggcgaatacttaacatatggcacaactaaaaacgtcattgatcaaaaagatttaaacggcacaacttggtaccaattagaaagcaaaggttggattcctgctagctacgttgttttaaacaaccctaacttggatggtgtcacaccaattacaaatgcacctgcagtgacaccagttgctgcaacaaccactacaactgaagttcaagcaccaactgctcctcaagcaacaacgccggcacctgctacagaaacaccagcgcctgctgcaacaactgaagcaacaacccctgttgctacaacaagtacaccagcagcaacaacacaacctgctcaaacacaaacaacgacaactcaaagcagccaacaaacaattcaagctacaacaactcaacaagcaccacaaacgaatacaacgacaaaagcaagtggtaacgcacaaactgttatcaacgctgctttatcacaaatcggtaccccttatgtatggggtggcacaacacctggtgttggtcttgactgttctggtttagtgcaatatgcatacgcacaagctggcgtttcattgaaacgtgttacaactgctcaagaaggtgctggtcaacgcgtctcacttgataacttacaacctggcgatatcctcttctggggtggcgctggcgcttcatatcacgacgcaatctacatcggtggtggccaatacgtccacgcaccacaacctggcgaatcagttaagacagcaagtatctcaagctacttcatgccttcattcgcagttcgcgtcctttaatcaaaaatatgtatttaaaaagagccacatcttaggatgtggctctttttttgtggttaaacttagtttgaaatatatttattttccatattaaaagaccatccaaaggctgcttttcaagcgacttttagatggtcttttaacattattttgaaaaaattcattataattatttagctgatttacgttccttcaagaagttcaatacagcagctgtttcagcgttacgttttttagcattgttttggttaacaggacgacggttaccagaaacactaacatgtaagttttgtgacattgcgcgtttcctcctttcgtgcatatattctattattctaatctgaattgacttatttttcaagttaactttattcgtcttttggttttctgaaatagtttaggagccaactggtcagcggaacggttgctatgaccccaatcactccgattaatagtgcgagtccctcaccaattaaaattttatggttcacaattttactaattggataaccgagttgaatgaaccacatcgttaatgacaagaagctaccgaaaaaactaaagaacagtgtgttaaaagccgtcgcaataattttttcaccgatcgcaatccccgctttaaagagttgcttggggcccatttgtgcgtcgtattctaagatttcgactaaaccactggcaactgcaatactggtctcggcgattgcccctaagctgcccagaatgatcatcatgatactaattttttggaacgacaagccgattgcgagtccaaagccttcaatctcttctgcatcttccgcaccaaagccgtaggtagctgctaactggctgaggggcacaatattgatcagcaagcccaccaccacgattaacgacgtcacaaacgccgtcttggccgttaatggctgcttggtattcatgaagatggatgtcgctaacaaaatcagactcaacagaccactcacaatcagcggttcaaacccacccgccaccaagacgagcgctaatataatcacgacaaaattcaacccgaggctgaagaaaatcgtcaacccttgccagccacagactagcactaataagatcagtaaaattcccgttagcaacatcataggcgtctcacccgcactaaccggctggccaacaagctcgttactggcaccgccaaagtaatcccaatcgcactaatcaccgtctgcgtaaaacttaacgtgacagttcgcgataaggtatacgcaattgtgttgccattgcgtagatacaataaaataattggaaaagcatccgccatgactaaaaagaacaacacattaactaacggaccaataatttcgcgaccaattgtgagtcctgatttaaacaattcagtcttcgtaacgtttggccgttcaatcgctaattgctggagtgacgatgaaatatcggtcgtctcatccatcacagcgcctaaaatcccgagcacgacttccgctaagaagaccgttttatacggctgtaattcataggccatcgtttcataatgcaagccttgatcgccggttaatttcaagacggccatgctgagaaacagtgctaggaacgttgcgccaattgtcgcgccatatgagacaagcatctggcggttgggtcctaatactaaaagtagcgttaaacccgttagaacgaccgctaagccacacataatcggcaataaccaccgtccacccgtcatcgcgtttaaatggagtgttaagacgaatgcgacgagattgaccaagacactgattagcgtcatcaatccgcgcttgagcatcattagtaataggaaactaaacgtcaacagtgttaagccaacgatgattgtatcgcgcttaggctcgtttaaggtccactttttcaaatattgatcacggtgtaaaaagacttgttgtcctttatagtaccgcgtcgacatcgcttgcgacgccgtatacgtattgcgcagcgtaatcacttgccctttttgcttagtgttcaaaaattggcccgtgacccgctggactacttctgtatcttcattttggtacgcatcagtctgttcctcacggctaattgtctggacccgcgttacccgaataatcggttgctgatacaaaccagcatcgaaatacgtccctaatacaccgaggacgcagatgacacttcctattagaccaatccacagccgtttatgttttaccacagtcgtcacctctgttttattctagcgtttctgcgggtgaacgtcagctttttgaggctgatttaatcattatttaagcgactattgaaaatcccatacgtaaagtagaccactaagccgatgacaaaccagattgccgctgcaatccaagtgacttttggcaattcaaacatcatcaataaacatagcgctcctgatattaacggtaaaactgggtaaaatgggactttaaacccatttttattcggaatgtccttgcgcttccgcaatgggatgaccccaatcgacatccagaaaaaagccaccaatgtgccgatgtttaccaaattagtcaattgatccagtgaaacgaacccgcctagaatcatgatgactaccgtcacaattttgatactgttagttggggtttgatgttttgcagtcactttaccaagtgcttttggtaataagccatcacgaccaattgaatagatgaggcgggaactgctgtaagtcatcgtcaacatcatcgtgaacatccctgctaatgcgccgagtgaaatcagaccggcaaaccaattttgatggacgacttgtagcgcgaatgtgaccggattagcaacgtccaattcgcggtacgacaccatccctgtgaggacaaacgccactaatatataaagcaacgtacagatgattaacgtcccaataatcccgataggaagatttttttgtggattcttaacctctgccgccgatgctgacacacagtcaaagccaaggtaagcaaagaagacgagtgatgcccctttgaaaatcccacttaccccaaacggcatgaacggttgccagttagcgggtttcacgtagaaaatcccgacactaatgaaaagtagcactacgcctaatttaatcaaaaccatgatgttattaattcgtgttgatgaacgagtccctcgcattaataatgtcgcaatcaagcccactaccagcatcgcaaacaggttcacataagtgccatgtgccggatcaaacgggccagtaattgcatgcggaatatggatgccaaacccttcgataaatgatacaaaataagccgaccaaccagttgaaactgccgcaactgacaacatatactccaagaataaagcccagccaagcagccaaccgattaactcaccaaaaataatattgccatatgagtaagcacttcccgcaactggtaatgccgatgaaaattcggcgtaacacatcgccgcaacggcacaaacgaccgccgcaatcataaatgaaatcgtgattgccgggccactatgtaacgccgcaatcgttcccggtaagataaaaatcccggtcccaatcactgcccccacgcccaatgcaattaaatccttagccgttaatgttttggccaaccgttgatcttgttgtaaataacgttccagtgattcttttcgtaacatctttgccattaatcccattttaaccactcctatttttattgtatgcactcgactaggcgattactcgccgcctaccaggcttcgtcgcacttctttaacgtgctccttgaactgccttctgcgcttaactacagaatcacaatggcggtcgtacgcccaccattgcgctttttaggttatgctcgaagccaaatcgttcaagtcgcacttctttcttaacgtgctcctcagccagatacttccgtatagctacgtccagtaaacaaagctacaacccagctttattcactggactatgctattactcagtatctaaccaggcttcgtcgcactcatttaataacaaaaaaaggagcccactagtcttcactagtgagctccaccaggaagatgactcggggttacccagccatcttccaattcattaaggtttgtcatttcaactcaaatgccttctccttaatcaaccagtcgattactgggtatcttaaagaaaaagctaaaggcaacacgttgcattgaattcatgacagaccctccttgttattaattagttacttagtataggggataaccatttatttgtaaaggattattttaaaagttgttttctaaaaataatctgctagaatcaaatttaacttattcaatggatgtgactggcattgaaaatcgcatgctatttttctgacaactcgattggtacgaactgttcatgcacgtgcgtggaccgtttatttccgattgccgttagagattgcttgcgttaattttcaggtcagttacctaaagacttgttaaaagacgctgttattgcgtctttttttgtgcatttttaacgacaactgggccaatctcattcaatcaatgaggtgataattcatgggcacaattcaattcaaagcactcacatttaactattcagatcaaacacaaccgttgttcgatcacgtcacgcttcaattcgacgccagttggaaactcggtttaatcgggcgcaatggtcgcggtaaaacaacgttattaaaattacttcaacaccaactaccatttgatggccagttggttaccaatctcgattttcaatatttcccacagactgttacagaacctacgcaactcacacgcgatattctaatgcagctaggtaacctcgacaattcaaccttctggcaagtcgagcgggaactgcggctcctacaagtcgcacccgaaatcgtctggcaaccatttgcttcgttaagtcctggtgaacaaaccaaaatgttactcgccttactattcatcgacgactatcattttcaactgatcgacgaaccaaccaatcacctggatcaagaaggccgccaagtcgttgccaattatttacgccaaaaagccggcttcattgtcgtcagccatgaccgccatttcttaaaccaagtgatcgaccatatcctagcgattaatcgtgccgacatcaccgttcaccaaggcaactaccaaacttggcaaaccgcccacgaccaacaagctgcttatgagcaacaacagaatcaacaactcaagggcgatatcaaacggctgacaaaaacagcacaacaaaaagcgcagtggtcccacgaagctgaaaaagggaaaaacgccgccagtgtcaaaactgaaagtgccaatctcgataaaggcttcatcggtcatcgcgctgctaaggttatgaaacgggcgacgacaattgccaaccgcgcggaagaagcaatcgaagcaaaacaacaactttttaaaaacgttgaaattgctgcaccactgaccatcaatcagcgacccctcaaacccggtcaaaatgtgcttagtgttgatgaacttgtcttacaacaagacggcgtcatccttaatcaaccactctcattcaccttagaagctggtcaacaggtcaccctaactgggattaatggcgcaggtaaatcaacactgattaaggcgttacttgcattacccgcaactgaccacattgccagcggtagtctgcaccttaatccgcacttaaccctctcgtatcttccacaagatttcgatcaactgagcggctcactggccgacttcgctgctgcgaaacaggttgatcatgaacaactgctaagcacgttacgcaaactaggctttgaccgcgatttatttacccaccgtctagaaatgatgagcatggggcaaaaacgcaaagctgcactggcgcgttcgctctgtgaagaggccgactgttacctctgggatgaaccgttgaattacctcgacgtcatcacgcgtgaacaaattcaagccctaattgccgagcaacgcccaaccctcctattcatcgagcatgatgttgacttcgttaacgccatcgccacccaaacctacgcacttcaaccacaacactaatccgtattatttgtataccgtgtcacgttgtacccgcgcacgttgaagtaagtcgttggcgactcatcatcaaaaaaggccgggttcatatcattaagtcgcgtttcggtattggttaacgtttgttccggcagtgctaaattttcacggagccgattcgaagcagcctgcaaatcttctgtactaatgatttgataggtactgccgttaagccacgccgttttacctagcaattggctgctgacaatttcaccactactttgatgatagttgcgaatcaactgcttcacttggtcggctgtaaaatcagtgctaattttctgaccaagcttagtcattaagtcaccaatgttcatcaaatattttggcttttgaattttttgcgcaacttgtttcaaaacttcttgttgccgcaattgccgcccatagtccccgcgcggatcttgataacgcatccgactataagcaagcgcctgatcaccattgagatgatggtggccttgtggaatcacttgtccattcaaattaacgtcaatcaccgtatcgatggtaatccccccgacaaaatcaaccaattctttgagtgcgcccatatcgaccgtcaccgagtagtcaatcgggagccctaaaaactgactgactgtttttttcgccatcttagccttaccaatttcataagccgcattaattttctgaatattaccgccgtggtcatctgccatctctgccaatgaatcacgcggaatagagtagaccaccgttgcttcttacaccgggttaagtgttacaaccatcatcgaatccgacagaccacgatcaacgcgcccatccgcgcctgtgtcaacgcctaataataggaacgagattggctttcgctgatcaatttgttttgaaattcgactagacccggttttaatcgcatcaacagctttatcctcttgatgcaaataaaaacctagcgccgccagactaatcacaacaatactactgattacaatcacgatactgatctttttcacagtcaattcccctttgtttaaacgcccaccgcatccttttttagatatgaaccaataaatgctgtcccccttttgaatcgttcgattctggcggacagcattttattttaacctttgctttaaccgacgtaagccaactagcatgaccggcgctaagtgcgaccgattaagccatcgtagccaccgggatgtgccggttggtaaaccacgttctaaattgatcaattgcgtctgaatgaattgtcgctcaggaacagtcagtgtgcgctgatcaaaaacaattaacattctaaaaaaggtccgcacatactgctttaaaaatcgtgtgtaagctgcgcgatccacttctgcaattccagccactaattgcgtctcaatgatgtgcagagctgttaagttaactgagaaccactgcggctttagggtactcgtagccgcctcagcatgccctatctcgtaaacatataaaaacgctgcccgatgcctaacaactcggcaatgttgtaaatactgcaagttgaaaattaaatcctcaccgatacgcagcgattcatcgaaccgcaatgcttcagcttcaataatcgctcttcgatacaatttattacatgattgaaagaagacattttgataatagtagtctaaaaaagcccttttgccgtcttgtattgatagtcaccatcttcagtcaaaccaaaagcagaatccgttccgccggctctttcgattttagttctgaatagcacccaatctaccgactgaccgacgactggttcaaataattgggcactgttaaccaagaagtcatcggcattctcagcatcaagttaagcccataaactaatcagtcataaaaaggctgcatcaaaattacttttgatgcagcctctggttcaagcatagactaactacgctttgtttgttattaatctaatttccgttccaactcactaacgatttcagcatgttttgcttccgttaatttaatcttagccatgaagattaacgctgaaataaccaataacgccattggaatgaagaacatgtacattttgaattgcaacaaccccgcgttagtgatatcgcttggtttcgcattcccagtcatgccagcatgaatcgcagccgtcacaacgacgccgtttgcaaaagccccggctagtttatccaataaaggtcgcactgccaatgttacagattcattccgtgtaccacttttcaattgtccgtattcaacactatcggtaatcgtcatcaaagcagccaaaaagaccagtggatatgggaagaagaataagccgaccgcaattaagactacgaccaagttacttccagcaaacaagaagaggatataaccaagcatcatcattgcgattccgccaatatagattgcccggcgatgaattaaagcaaccaatgttgggaacaacgcaactgacacaatccctaagatggcagtaatcacaccaaccgttgagaacgctgcggcgcggcccatgacatatctaaaataatataaaagcagtgagttcgtaatcacataactaaaggcaaataagaaatatgaaagagataaccacattaattggtcatttttaccaatcacactgaaaacgtcacgtaaccgaaccttttcagtattttcccgaatagcactcttttcttctttggttcctaagatggtcgctaaagcgcctaagaatgaaacaaggccaatgacaacggcaaaaccgaaccacccggcactggtttgttcactcccatgactcccagaaaatagttgcgagaagaaaaccaccattggcacaatcacgataatgaccccttgtgcacctaaagtggatccgaaacgcgcaatcgccccaaattttgtccgcttttcagaatcaacactcagcgctggcaacattgaccagaacgagatgtctttaaacgagtagaagatatctaaaatgacgaaaacgattgcaaaaagaactaagtaaagataagggctacttgtcgcaagccctccaaagttggtaaaaatcatggccaagccaacagagctaataattgaccccgccagtaaccacggcttaaatttcccccaacgcgtccgtgtattatcaaccactccaccaatcagcggatcgaaggcaatttcaacaatccgaatgaccatcattgtataagtgacatacgcaatcatttttgaattaaagcctgcatttttggtatcgaataattgactcgtgacgaacatcataaaataagtgctaagtgttgcataaaaggcgtcatgcccaaaggccccaaaagcgtaagaactatactgtttaacatcttttagttttttcatttctttagattcctttcgatagtttcttcattgtaaacatgctttcatcaagcacaaccctcgggttatcccgtttgatgacgcactctagtgatagcgatgttcgataattttttccaaaatcgcttggcgttgcttttctttggctgagccgaattggttttcttccaatgaattaaaatcgttggcgagtaaaactgattctagatataacgtcaattgacgcttgatataaaccttattgtcttcattcgtttgcttgggattcccagcgataattgctgcagcaaattggtctggatcgataataattttgttgtcgttcatcctagtcgcttctttctcttttagttagtaaacgtttactatctacaccatacaaataaatcaatctgtacaagaactatcctgtaaacgcattcttttagattgcaatcttattttactaaacttttagtaaaatgtaaacggttatttggaaaccgttacattcatcactggttacagttatgaatttaatttcactaaatatttatttttttattttttattgaaatttaatttcattagcgctatactacatctatagaaaacgctttaaaaagaaaggagttgctttatgtttggtttttctatctatcttaatcaaccgttcacctcagcaagccgcatgaaccttcaaaaaatgcacgccgctggcttcacagaagtcttcacgtcgatgcatattcctgaagatgacatttcacaatacactgctagaatcaaagcactcagcactgcgtgtcgcgaagaacacttacaattgatgattgatattgaaacaagttcattaccagcagttggtctctcacttaacgatcccgccgcaatactgtcctttgggattactggtttgcgaattgatttcggcatcgataattcaaccattgctaagttatcacaatatttgaagattgccctcaacgcaagcacaattgccgaacaagatttagccgttttacgcgcagctggtgccaacttcgctaacatagaagcttggcataattattaccctagaaatgaaaccggtttagaacgaacctggtttactgaaaaaaatcagtggcttaaaacgcaaggtttaaccattcaagcttttgttcctggtgatggcattttacgcggaccacttgaagaaggattacccactttggaagcccatcgttatcagcatccgcttgctagtgcgctcgatttattcaactgtgaaacagataaggtcttcatcggtgatccaactttagcaaaaaccactctagcgcaatttgatgcattctaccatcaacacgtcataaccttgtacatgcttaagtcagccccctgccccccttatctttttaaccaacatttccataatcggcgcgatgtcgcccgtgatgtcatcagattagaagaaggccggccactttgtcagaccacaatccaacctgaacagacatcagtacgattacgtggcagcatcaccctcgataaccaagactatggacgttatatgggcgagttacagattaccaaacatgacctacccgcagattctcgtgttaacgttcttggaaaagtcatccaaaaagatcacgcattactgccattcattcaggctggacaagccatccaactaaaggagattgattaatatggatttaagtcatttaacaaccgaaaaccgtaatcaaaagacaatgcaattggacgaactttcaattgaaaaagtactcacactaatgaacgaagaagatcacaatgtgccagaaagtgttaaacaagcactccccaatattgaagctgctgttcaagttatcattcaaagtttccaaaatgagggacgcttaatttatatgggcgctggaacaagcggtcgtcttggtgttctcgatgccgccgaatgtgtccctacttttggaacagaaccggaactggtccaaggtttaatcgccggtggtatgcaagcaatgaccgttgccgttgaaggggcagaagattcaccgacattaggtcgcgaagacttggaagcaatccacttaaccgctaacgatacagtagttggtattgcggctagcggccggaccccatatgtcatcggcggtcttgattatgccaaccaaattggtgccagtactgtcagcttagcttgcaacttcgatgccctcatcagccaacatgccacaattaatatagaagtcgaagttggtcctgaaattttaaccggttcgacccggctcaaatcaggtactgctcaaaaattggtgcttaatatgttatcaactgcttcgatgattggaattggtaaagtctacaaaaacttaatggtcgacgtgaaaccaaccaacgaaaaattagttgaacgtgccaaacgaatcatcatggctgcaactgattgtacttacgatgttgcggcaacccaatttagcgccgccaacgaagacgttaaactcgcaattgttatgattttaacggatttatcggctaatgaagccaaagaacgtttaacacaagcacacggttttgtacgtcaaactattcaataacaaaccttaaggaggcactattatgactgaaaaaaaagaagtacgcttagccagagaaatttacgccgctgttggcggacccgcaaacgtcgctaaattaattcactgtatgacacgtgtgcggatgacaattcgtgacgatgatcaagttgatatgactgcgttaaaagcaatcgatggcgttttaggggttgtcgaagaagacacgcttcaagtcgtcgttggtcctgggattgtcaataaagtcgcccaaatcatggtcgaccaagtcggtgttaaacttggtgaacccttcccagaaaatctcaccacaactgccacagccgcaacaatgaccgaccgcgaaaaagtcgaagcaaaagccgctgaagttaaggcaaaacaaaaagcaaaacaaaagagtacgccaaccaagcgggtcttaaagtcgatttcaaatattttcgttcctttaattccggttttcgtcggcgctggtttaatcgggggaattgccgccgttctatcaaacatgatggtcgctggatcccttggttcaaactggtctgaattcattaccatcttaaacgtcatcaaaaacggcgtcttcgcttatctcgcaatctatgttgggattaacagtgccacagaatttggtgcaactcctggtttaggtggtgtcattggtgctgttacacttctaagtggtgttgatcctaagttgccattacacaatatcttcaatggcgatcctttatctgcaggccaaggtgggattatcggtgtcatcttcgcagtttggattctctcattggttgaaaagaaattgcatcaatttattccagattcaattgatattattgtcacccctacaatttcattattattaattggggtcttcacaattttcatcgttatgccggtagccggtgtgatttcaaattcacttgtcggctcaattaattggattctgaatgtcgggggtgccttctctggtttcgcgctcggtgtactcttcttaccaatggtaatgttcgggctccatcaagtcctcacaccaatccatatcgaaatgatcaacaaaacaggttcaactttacttttacccatcttagcaatggctggtgctggccaagttggggccgcacttgccctttggattcgttgtcgtaagaataaagaactcacaaatatgattaaaggggcgcttcctgttggcttcctcggcattggcgaaccgttaatttacggtgttactttaccattagggaaaccattcatcactgcctgtatcggtggtgggattggcggtgccgtcattggtgcaatgggcggcgttggtgcgattgccatcggacctagtggcttagccttaattcctttaattacaaacggccatcaattcgcttatatcttaggcttgctcgcagcttatgccggtggctttgtcgcaacttatttctttggcattcccaaagatgctacaatggaaaaataacctttaaaggacgctgattttatggaaagcatacttttttcaattcaaaagaaactcccaactttaaccaaaacagaacagcggcttgctcaatacgtacttgcccatccagtacaagtaccgacaatgacaactagtgcgtttgcaaaagcggctaacgttagtgcagcgactgtcgctcgctttggtaaaacactctgtggtcaaggtggctttccagcactcaaattacgactttcatctgaagggaataccgatcaacggctcttcgatgaaattaatccgaccgatacaacaactgacttaaaaaataaactaacttttcgaattaaccaagcgattactgaaaccaatcatcggctcaagaatgacgcgctcgaagaatccgcaatgattctccactcgaaacaaaccattttcatttatgggcttggtgcttcaaacgttgccgctgaggatttacaacaaaaactactgcgcgttggtaaatctgtcattcaatcacttgatacgcatctactggcagcagcactaaccacacagaaaacacaggcagcacttatcttaatttctaactctggcgaaaaacaagagcctctgcaacttgctaaaattgcacaacaacttaatattccaattattgttttaactcataataatcaaagtcaaatcgcacagttagcaaccatcacgttacagcatgatgatagtactgaaaacagtcagctaagaagcgcggcaacgacttcattaattgcacagctttacgctgtcgacctactctattacagtttcttagaacaagatttcaccgctaatacgaaccaattagctgattcatcgaacgttatcagcgaatattttactaagtagaaggagtcatcattatgaaactattctcacgtaaacccaaagaactcgaattacacgctattgtagatggacccgtcatcccgctcaaacaagtaaccgacgccgttttttcaacaaaaatgatgggtgatggttttgcagtaaaccctagtgatagtcatatctactcaccagtggacggtattatctctagtgttttcccaacaaaacacgcgcttgggattacaaccaaaacgggcgttgaattattactccaccttggcttggataccgttgaattaaacggtgcgccgttcaccattcacgttcaagaaggcgatccggtgacaacagaccagttattagttgaaatcgacttagctgcgcttgcttctgcgggtaaagaagcaaccagtatggtgattgtaaccaacatagacgatatcagcggtgttaatgcccccctaacaactagcggacaccacggtgaggttgcacaaatcattaacttataaaaataatatagaaaagccccgctcagatgagcggggcttttctatattatttggctaagactgttatttgattattataacatgcttgattatcaaactgcatcaatactttagtcgctagatcttgcgttgcaaaaactaatctttcaactggcgtatttgccacgttgtaagccatcatgtgtgaaaaataaacaaactgtaacatattactgtatgccgaaacatcgccttgtttcacaatttttttaacgaaaaaattaacgatatgatcgccaaaacgaacataacctggaatcgaaatcagttgtacgttggactgtttagcagcctacacacgattggccgcattatctggcgcgtaaatgaccgttgtccctgtcgtttggtctgttggttgcattgtaattaaagctgtttttgacattaatagatactcctcttaagtgatgataaggtccattgtaccagagattaccgtttattttagtaattctagaaaacggttctgccaaacgttttcgtaaaaggcaattgtctgttcagccgtcatataggcgttgtccgttgtagttgaaagaccagctaccatttggagttggtagcccaaatggtgggcaactttaatcgttgtatcgacgcagtatttggtctgggcaccacaaatttcaagcgatttgatttgcatttggctcaataacgtttgtaagtttgtctgccaaaatgaatccgcatgcgttttttgaacaaagattgccgttttaggcacattcaattctggcattatctaccaagtcgactgaccagcaatcaaagtcttatcgttatgttggacaaaaataatcgggcgactttccgcctgataggcatcaattctggcattaacgcctttaattaattgattaagacgcgcaacaggctgctcacttttgcagacaccattttggagatcaatcactaataaacaatcggctaacttcagcattagtcccctctttcctttaaatcaaatcgagtatatcattatttaactaaacctcatattttgtctgacgatattaaaaagaagagatgcggattacccccacctcttctttttcaatgtctccgatgtttttcccgcttcttaatctggtgttgctgaaaacggctgtattgtatggccttcttttcggcatgttgttcagccctattagttgcatgttgtgctttacgttgactactcatccgaatctttttgttgataccaacgaattgaataccaatgataactgacttggcaccctcaaccacttgcatttaaacaattccttcacatgattatcgctcaatcccccactttcccgccaaaagcgttatactatggataataaataaaaggagtgttttgacatgcaaaaaccaattaaagggtcatgtaccacggtcttagtcggcaaaaaagcttccatcgacggttcaaccatgatttctagaaatgatgatggccacgaagctttggatccacaacgctttgttgtggtcaatcctgaagaccaaccccgagattatcaagcggtgattagcggcgttcaaatccaattgcctgataacccaatgcgctatacctcaattcctaactcattattgacgaacgggatttggccagctgctgggattaacagtgaaaacatcacgatgtctgccacagaaacgattaccactaacccccggattcaagggcttgatccttttgtccctggtggcatcggtgaagaagatattgtgacattagtcttgccttacatccacagtgctcaagaaggggtcgaacgtttaggcgccctccttgaagaattcggcacatacgaaccaaacgggattgccttttctgacaaagacagtgtttggtggcttgaaacaatcggtggtcatcactgggctgctgttcgcatccctgatgatgcatacgtggttgcccctaaccggatgaacatcgatcatttcgactttgattcagccgacacgctttgctcagctgatttaaaaacattaattgatgacaaccacttaaatcctgactttgaaggctacaatctccgtcatattttcggcagtgcttcaatcaaagatacggtttataacaacccacggacatggtacggtcaacaatacttcaatcctgaaatcaaacaagatccaatggaccaagatttaccattcatctgccatgccaaccgcaagatttcaatcgaagacgtcaagttcgtcttgagcgctcactttgaaaatacagaatacgatccttacggtagcgcccctgaagatgttaaaactcgtttccggccaatcggaattaaccggaatcacaacgtgcatattttacaagtgcgcaacaacgtgcctgctgaaattgccggtattcaatggttagcttatggtgccaatacatttaacaccgtcgtgccattctacacgaatatcaacgacacaccagaatcatacaagaatgccacaggtatttttgacttgaacaacatgtactggttaagctgtacaaccgccttacttggcgatacagattacgacttctacgttgatatgcgtaacaccttcgaactcgaagcaatgagtgcctatcacgtgatccaaaacgaaaccgacaaggccttcactgatcaaaaagacgctgcagccttcttggaagccgctaataacaaattagccagcgaatcacttaaacgccaaacagccctacttggccaaatggtgatttcaggctcagaacacatgaaattacgctataacttgaacgactaataattatttaattcaaaaaagagcgtctcagctattcgttagttgaaacgctcttttttgagttgtcctcttttttcagtagcgtataataaatactattactcaaaccacactaaggagtcatttatcttttgaaaccccaaaaattaaaactatcggattacttactcggctttggattcgtattattgatggtgggcattgccactgtcttgaacgatgttgagattattctacccgaaatcgcagccttaacaacggggctgtggatttatcacgaaccgggttggctcaatcaacccgccaagatattttggctgccatcgataaccgccatcgttgggtttggcattaatcggttgccgctcagttatgcagttaaaattagcttactactactcatcatgattgttttactttgtttatttcgctcaacactcgcaccatcgtttgcaacggggctgttaccgattatcgtcaacgccactgaactttcattcatcattgcaattttaggctttacgctcactttgatgttggtcgttagcctccgcaaattgcatctgcaacatccctatcatgccacgattaactatcgcgtcatgctggtttttctaatcattgcactcttatgggtgttagttgttagtttactcggccggccacagatggctgccattccgccggtacttgtcgtcttttttgaaattctacaaaaaccaatgtatccaggtaaaatggccatcaagcagatggttgcattaactggcgccgccacaatcggattcgtcgcttatagcttacttgattcacggttattggtaaccttaattgcactgccactagtttgggcattactctatctgctacaagtcagaattcccgccgcctacgccttccctttattggccattattctcccacaccaaatgtttcaaagtttgccgctcgtcactttactggcaactagttacttttttggggctgcttatttataccagcaatacattaagccgcgtctcatcagcagataacatgacggtttacgactaattttattagttgtaaaccgttttttagtggctttttgcacaagcaataatattgcagtttcgctgagaaataatatagttgagttgaccctgtcttatctctctgggcacaaagtgcaatgaaagaggctatttacatgacaaacaaactaacgactaatgagggccaaacgtgggcggataatcaacattcgcaaactgctggtcaacgcggtcccgttttaattcaggattattaattgctcgaaaaactcgcgcattttaatcgtgaacggattccagaacgggtcgtgcatgctaaaggcgccggtgctaaaggttacttccaactcactaaggatatgagcgcctacacaaaggcagccattttcagtggtgctggtaagaaaacaccaatgattgcgcgcttctcacaagtagctggtgaagccggctatcccgatacttatcgtgatgtgcgtggatttgcccttaagttctataccgaagaaggcaactatgacattgttggtaataatacgcccgttttctttgttaatgatcctctgaaattccctgatttcattcactcccaaaaacgagattcacgaacacacgcgagaagccaagacatgcagtgggatttctggtcactttcacctgaatcagtccatcaggcgacgattttaatgagtgatcgcgggattcccgctagttatcggatgatgcatggctacggtagtcatacctttaaatgggtgaatgctgctggtgagcagttctgggtaaaataccacttcaagacaaaccaaggcgtccataacttaagtaacgaactggctgccgaattggctggtaaagatacagattatctacaaaatgatttattcgatgcgattgaaacaggcgaccatccaagttggaccgttgccgttcaacttgttccttatgaagctggtttaaactatccgcaagatatctttgatgtgacgaaggtcatttcacaaaaggattaccccttaatcgaaatcggtcaaatggtactcgatgaaaatccaaccaacaactttgaggatatcgaagaattggctttctcacctgctaacttagttcctgggattgaagcttcccctgacaaactcctccagggacggttgttcggttataaagatgctgaacgttaccgtctaggtgccaactatgaacaattacctgttaaccggccaaaagtgcccgtgcataattacgaacgcgacgggatcatggcaaaaaaccaagagacaggcgtcaactatgaacctaatagtgaaaatggtccaaaagaagtcccatctgccaaaattcatggcgaccaacttagcggtcaaaccggtaactatccagccgatcccgattactattcagcagccgataagctttacaacttactaactgatgaagaacaagatcgactaatcgaaaacattcgcttaaatctcggccaagttacaaaacctgaaattcaaatccgcgaagtcaaacagttctaccaagcggatccagaatacggtcgccgagtcgcaacggcattaaatttagatttaaaccaatttgaacactaatctatacaaaaagaaggtatccggcccaccggataccttctttttatttatcttcttttggagaatcttgttttgctgcccattctttcttggtcatcaagtcagagacattcattttaatcttcgtcacgtttaaaccagtcatttgatgtactgatttagcgatgcgttcaattgtttgttcgaagatgtctggcgctgatttaccgtattccaagatggcatccaattcaatcgttacttcttggttatcaatatcagcgtcgacgccctttgtcggatcttcttggtctctgaaacgatcagctaattgactcatcatcccgcctgataattctaagacgccatcgatgtcatgcaccgtttggcccgcaattttttcaatcacaccatccgagaagttcaattctttttcgattttttcggtatgttgatccattgtcttatccatcattttatccattggtttgtttggtttatccatcgttttcatcatcctttactatttttattgaacgcgtttttcagaatcacttttctttggattactgccttgttgttgccattctttcttagtcataatgtcactgacatggctgttaacttcgacaacactcaaaccggtcattgattcgacagcttcagtcactgcagctgttaatcgttcgaaaacatcccgtgcattccggccgtattccaaaataatggtcatgtcgattgcgacctgtttttcgccaacttccacactgatgcccttcgttggatcactatcgtttctaaaacgatccgcaatatcactgaagaaattaccgttcatcgataataagccatcaatgttttgcgctgtcttaccagcaattttggcgattacagcatcttcaaaagtcaatttgctattggccatcacttcatctaaatgtgcttgttctaccattttgtcacacctccgttatttatcctgcttcaagacccggttaacttgtgatctaaatccttctagatcttccttagaccctgttaaactagctgcaatgtagccgagtaaaccagcgatgataatcaagattaaattcataaatccaaaactaatccaaatggctgccaacactgccccaacaacaaagccccaataagaacgtctcatttgtctcacctcacatcactttttgcctgattacttagcggtgatagtttgacattcactgctttaatcggcatctcaaagattgtttgtaatgcttgctgtaccgtttctttaactgcccgtgcttgttgatcgagatcgttgcgatccactgcgaccgcttgaacgtcggcagtcacttttggatgtcggcctttaaacgtcgtatggactaacacttccttaacacggtgtttttcaataatagcttgtgtcactgttttttcaaccgctttgcgggaaagtgctagttcacctttatcggtcttgatgatcatttggcgttttttcggtggactgaataatgccaatagcagtaaatataagaaaattaagccgctaagcactcctaatccaagtccaaaattaccgacccattgttcgggtagccaactaagatgcataaattgcttattggattgttgtagtggatagattaatgtgataaaccacgctacctgacacaacccaagcaaactggctaaactgatcaccactttagttaatttattcatggtgtccgcccctttgtattaggattttctacgtgtgaataataatgaaacaacgaaaacgacaatcacggcaccgataatggatggaattaaggccatcccggcaagctgtggtccccagctgccaaacaatgattggcctagccaggcgccgactaacccaccgacgatattgccgatccaacctgcaggtaaatcacgacttgtcaatgcccccgcaatcaccccaattaaagcgccaataattaaaacccataaccaatgtaacataacaatcatcctttcttgtttccttaaaatatattgctggttctccataaatgtaacaaattcaaccagcatccgtaaaacaatacgcttatcaatattattaaattatcgtaaatgcacttgtttaattaattgattcgccaccggtaacgccgtaaatttgaccggtaatatagcttgctgcgttgcttgctaaaaaaacatatagcggtgctaattccgccggttggccggctctttctagcaatgtattctgcccaaacttaggcaaagccccttccagttgtccttgagccaactgcaacggtgtccaaatcggacctggtgcaaccccgttgacccgaatacctttatccgctaattgttgcgctagattgatcgtaaaattcttgattgctgcttttgttgctgcataatctaacaaatgcggactcggattaaaggcttgcactgaagtggtcgtcagaatactgccgccagccggtaattgagacaatgctgcttgcacaagcgcatacatcgcaaccacattaacgttaaaactatcttgaacttgttctattggtaattcggtaattgatggatgcgcaatttgttgagctgcgtttaagactaatgtgtcaagtgtgccaatttgctgctgcgcggtttccactacttggctagcaatctgtggtttccgaaaatcagctgggatcaatgcgattttacgccctgcatctcgcaccaattgagccacttcttgtgcatccacttcttcacctggcaaatattgcaatgcaatgtctgctccttctcgggcaaacgcaattgcaactgcgcgaccgataccagaatctcctccggtaatcagcactttacgatctagtaaccgttgtgcaccacggtagtgttcttcgccacaatctggcttgggatgcatttgatcttgcaatgccggactaacttgttcttgttcttgaaatggctctgtccgataaagtgttcgcggatcttttaaatctggtttacccatcttcttgttccctcttttccaattaatctagatacactgcttttaaatgttcaatgtcctgcgttgttaatcctaaggcctgttgtaaataggcttgagttgaaccataatcctcattgattatgcgctcagctgcgtttaagtaggactgatcaacactcatcaatgcatgcatactttttaaaaagccgcttgaggcatctttttgacgtagcgtcttaatgcgggctgcaacgtgttccctagatgctgtattcgataatagataatcatattggatcacatcttcaggtgccccgagtgcatttaataaataataagccgccattccggtacggtctttgccacctgtacagtgaaataaaactgcttgttgcggatcggcttcagtcaataatcgttcgaagaattggcgatacattccgattgaatagggatcttgcaccatttctcgatagacttggcgcatttgttgctgcccaccaagcggattattggtgtagcgctcataaagttccgcttcactcgccgtactttgcgtcgcatcttctttaaaaattggcaacgattcgtaagatgccgtcgtaatctttttatctggcgcttttttgcgctccattggtgaacgaaaatccacgacataggtgatatggtagctttccaagagcaccaattctctcttactaagattcgccagattccccgttctgaataatcgatgcggtttaatcgagcgaccatccagtgtttgatagccacctagttctctgaaattgtagccatttttaattggtaatatgcgcgaaaccatcgactcatcctctctaatcaaccactttggctgctaggatcattgattatcatccaatttttgaagacacctttttaccgtcttgttactaaaaacacgaccatgatgatcaaattccaatggcccccagctctcaccgacgagggcctcaccgttattctctcttaaaattgcttcctccaaatcagtcataccttctagaaaacactttagattggctgattctttcttaatcaccaagcacaattctggggtcttgactgtactacgacctaacctaactttcctaattgggacttctttttgcataagtaaccttcctttcatgaaatttttaataacgctacaccatcaatataaaataatcacatttattgatgcaacttttatgattacgctttgttattgttagcacaatcatttacctttacaaagattgttgaagctgtttaaataaaaacagaacacctgaaaggagatggttattatcaacgctattaatatcatatttgccgcagatgaaaactatggtgatcaacttttaatcgccataaagtcggttctaacccatatttcgcccaaaactactattaatttttttattctcgataatgaactcactccgcaaacgaaacacgctgtttccaagcgcgtcccacgacccaatcaagttgagtttattgcacttaataagcagctttttgaaaactgtcctgaaagcaaccacatcaacaaaacggcttactaccgcattttagcgccaactcttttgttgcggaaaaaaatcgaacgtgtcttatatttagatgtcgatatcctcgtacaaactgatctcacgccgctatacaatacgcctttgggcacaaatatcgtaggtgccgtgattgatcctggacaagcactcacactgcgacggctcggcatcactccaccacaatcgaataacatctacttcaattcaggggtcatgctaattgatacggttcggtggaatcatgcatccatcacagagcggactttccacttcatcaatcatcatgcggatcgcttacaattccatgatcaagatgcgctaaatgccactttggttggtaaagtgaaactactccatcctaaatggaacgtacaaaactcattgctctttagaaaacatgcgcctatcaacactgaatatgcccatttatttgatgaagcaatcgccaacccggcaattgttcacttcacaacacacgagaaaccttggaacactctaaaaagtcaccccttcttaaaccaatatcaaaaggaactcaaacaattacatgcgcaacaatccgatataatcaacattgtatcggctgtcaattccgatttcatcgaaacgctggcaattctatacgcctcaattcttaatcacaatgactcacatcgacactatgctttttacgtcttagaagaccacctcaccgcacgagataaagcagtcttacagcatgttgtggctcgatttgatgccgacttgacctttgcagaggtcaacgaatctttactggccaatactgttgaaagtgatcggatcttgaaaacggcgtactatcggattctaattcccgacgtgttccctcacctcgatcgtgcactctacatcgattgcgatgcgctatgcctcacagatttagcccggctatgggatatcgacttaggccaatccttcctcgctgcagtagaagatgctgggttccacgaacgcttagaaaaaatggctatcgattaccaaagtccgcgttactttaactccggtgtgatgttactcaatctcaaaaaatggcgtcaacacaatattgtcagccgtgtactcgacttcatcaatcagcaccctgagaaattacgcttccacgatcaagatgctttaaatgcaattttgcatgatcggtggattcaccttcaccctatgtggaatgcccaaacaaacattttgatgaacaccatcacaccaccaactgaacacctcaaaaaacaattcttagaaacccaaaaagaacctgcgcttgttcacttctgtggtcacgaaaagccatggcatgcctcatcttcccatccattcacaccacaatatcgttactaccggcaacggttcttaaaacaaaaaaagcggctcgttcccttcgccaatcgccgttccctttctcaacaaggataactacaaaaaaagcgggtgcttagacaaatttatttttgtctaagcacccgcttttttaattgctaaaaattatctttttattgaccgactaagccatcatgaatcttatctaggttccacttcatcatcgtatagtaagtgtcaccttgcttccctctttgcgcgagtgagtctgtaaaaattttcgcataaattggtaacccagtttcctgagcaactttttccattgatttcggcgaaacagaactctcaacaaacagatgcttaacatctgaatctgcaatttttgcaagaaccgtcttcatctgttcaggtgtgccttgcgactcagtattaatttcccaaatgtaaaccggtgtgacctgataggccttaccaaaatacttaaaggcgccttctgaagtcaccaagacccgctgattagctggaatatcggcgaatttagtttgcgcatcagtatgcaatttgcgcaaacgtgcagtgtagcgatccgcatttttgcggtaatcatcagcgtgcgctggatctttggtctgcagcgctttcgtaatgttttcaacgtattgaataccgttcgccaaatccaaccatgcgtgtggatcgggttctgtttggttagttgtcaaatgttgcacctgaattcctttgctagcagcgaaaacatccttttcgaattgcttatgcgcgatcttaacaagttttctaaaccaaccattgccacccgtttcgagatttaacccgttatgaaaaatcacatccgcatcagtcgcttttgaaatatccgtcggttgcggttcatattcatgcgggtcagttccccgtttcacaatactgtaaagttcaatgtggtcttgaccaacattatggaccatatcttcaagaatcgaattcgtggtcactacacgtaatttagtctgctggttcgtttgttgttgtttagattgggcgcggtgctggatgaaaccatacacaccacccaccaaaccaaaaactgcaattaacgtcacaatcatttttttcatgctggtcgtcctcctttgcgccacttaaggaaaccttgcttaggcgcgcagatgaatgaaatggcaaagagcacggctgccatcagaacaatcgccggaccagatgcccagttcaatgtgtaactgaagtacaatccactgattgctgacacagcaccaatcccagccgataagaagagcatcgtcactaagcgatccgtccataaaaaggcggtggctgctggggtaatcaacatcgcaacgaccaaaataatcccgaccgtttgtagggctgaaaccgtgactaaggttagcaccaacattaaaccgtaatgtagcacctgcgtttttaacccatatgttttcgcataggtttcatcaaacgaggtaatcaataattctttgtagaagaatgagacgaataagatcactaagcctaagacaatcgccgtactcataatgtcgctatcactgacggcgagaatgttcccgaataaaatatgatgtaagttggttgcactttcggccatcgaaatcaggataaacccaagcgcataaaaggcactaaagacgaccccaatcgaagtatccgtcttaattttactatgtgttgcgacaaagccgattaagaccgccgctaaaataccaaatacagatgcgccaaccagcacattaattcccaacatgtacgccactgcgacacccggtaacaccgcatgtgaaatcgcgtcacccatcaacgacatcccgcgcaaaatgatgaaactcccgacaatgccagacatgatgccgaccattacggcggtcagcaacgcactctgcaagaattcataacgacccaacgcactaataaaagctggaatactcgtcattttgccacctcctgtgcatcaaacaagacagcggataagtccgcactaaaagcacgctcaatgttttgcgcattataaactttttcagttggtccataatcgacgatgccgtggttcatcaccactaaatcatcgaaatattgcgatactttattcaaatcgtgatgaatgacaatgattgttttacccgcatcacgccactgtttcatgattgccatgatcgcggtctcactctgtaaatcaatcccaacaaacggttcatctaaaataataatatccgcttcttggacgatggcgcgtgcaacgaaaactcgctgtaattgtccacctgacaactggccaatttggcgttgcgcaaattcgctgagcgatacttgttcaagtgccgcgcgactggcttgttttgcctttttaaccggatcgcggaataagcctaacttgccatacgtgcccgttagcaccacgtcaaaaacgttaattggaaaatttaaatccaaatctttacgctgttcaacgtatgcgacttgcttctgaactgcgcgcattggtcgatcttgatataaaactgagccttgccgtgccttaaccaaccctaatattgctttaatcagagttgatttgcctgcaccgtttggtccaatgatgccagtgattttgcctgcgtcaaactgaacggcaacatcagtaaatactggtgtgtcatcgtaagcaacggtgaggttcttaactgataacataaagagcctccattcttttaggtaaacctaacttttctcactacagcatacatgattttaatggaattaacaaatattttagtttaggctaacttttcgggatttctgtggaacaatggcttaggatgtttcacgtaaaacataataaaagagtcgcgctatttttaaacagcacgactcttgttattaattagaaatcttcgtcagcatcctcatttgaaacagtgtattgataaatccccttttgaccagatgctaatactttatctgttaatgcatccaatcccaagttgtcacggttgatgaataattcaagtaacatcggtaaattaacacctgatacgagtcgatactgtggcgcatcccgaatgatatcaaccatcacattaaaaggtgtcccacctttaatatcagtcaatacaaaaatttcagatagtggttcaaatgatgcaaaacttttattaatttgttggcgtaaagcttctgtcgtttcccccatttcataagaaacaactgctaaatgcacttgttgcccacaaatcatttcagcagcttgaactagacctctaccagcggcaccatgcgtacaaatcacaactccaatcatctctgttcctccagccattttaatatttcaattgacgatagtaacgtctaatttccattggatggcggttcaagtcttcgatgtgcacatcaattcgatcattgaccgcatgcaagataaatggtgataatgcaccgcggaattctggtgaaatccccggcatgtcgtaatctttcgcatcgataaccgtataattagcacagatttgtgggatgaagttagcaacgcgttggctcaattgtcgttgactatcttctgtcacgtaaattgtgactggtgtatcgcgttcaacaatttcgaacatcccgtggaagaattcttgcgcttcaattgattttgttctgagccaatgttgttcttcccaatagcacattgcatatgaatacgtagcaccccattggttaccagccccaacaaaataatgcatttcatcttcgtgatgtttcagtgcaaattctgtagcaaattcgtccgcatttttataaacagccacaacatcttttgcaaagttatcatccatttgtttgtagaattcgtcgtattgatcgaattcccctgctaaatacataaagcgatcacctaccatgaagaacttaagttgttcattcaatgggtatgaaattaaataatcacacatcgttgctaaatcggcatctacacgatcaacaaacccaattacacgtgcaccaatttcattacatttcttgacagcttcgaccatttcttgcgtatttccagtaactgaagagataatcacaaccgtgtcttttgtcactcggagattgccagttgttaagaacgaagctgcgttttcgtagaatgtttcaatttttgttctttctttcatgtgaacgaccgcttgcatggatgatgcataagtgccaccgatcccaatccaacaaatattactataaccctcatcattaatttgatcgacaattttattaatgtctgatctgagtgcaattccgccttctaagtttgccaataattctttttcgttaaatttcaacatctcaatttccttctttcaattttttatatttttgaatttgtaattgggtcaaaatctggaaaagctgacacttttagattaatttgcttgcgcgctgatgcggtataagccaataagtgaattggaatagtcataaagagtggggctaacaactcatcagttggtaacgctaagccgaggtcgtcttgacgatcaacttggccattcgtaattcggacaaccttcgccactttgccggttaaaaattgttgtaacttagcgactcgctcttgtaacttcccgtttggttcaatgaaaatcacatgatcacttgcgtggagtccaatataagggccgtgcatatactcttcaacttccttaccgagtgcggtaatacgcactgtttctgtaatcttagtttcaccttcacgggccacaccgtatgtgccaccataaccaacaaagattacgcgttgtactgtatcaaacacatcgctataatgcgctacccattctttagcagcatcaatgatgcgtggtaggtcagtcacaatgttttcaatcgctgccaaattcgtttgataactcgcttgatcctgtttacccaattcaagcgccaacaacattaatgtcaaaatcgtggcactatagccagcggtcacatagggcatctcttcaattggcatccctagtggaatcacatgctgacttagcttggcaatcggactgttttcatcaccagtgatggtataaatccggccgttgattgcttgaacccgtttgaccatctcaatcgttgagtagctatgcccaccctgggaaatggcgatatacaacgtatccggttgcaggtgcaacatatagttcgccgtaaaagatggctcctcgacaaaaacaggaatgcccaattgctggctcatataaggctgtgccgcaaacgccgcatttgaactcgatccagttgcaaaaatcacaacatttttatatgccgttgatttgtcattcagtaacgtacgcaatatcgtttgccgattggctaatatatcagcatagattttcggttctgcttcaatgtaatgcaacatatcctgcatgcttgctgcctcctacttcagtagacctgtgtaagcaccaaagattccaattactgcaattaataatagaatccagtgtgctttcaagccttttttatctaaccagaaaataaagagcgtaaagagtaatggcaagatgcctggtacaatcccatcaaaaatactttgaacagtcggcgcacctttacccgcaccaatcgtcaatggcatcttcagcgtcaccattgtcgccaccatcgatccaacaacgcccagccctaagacggaagcgccaaaggagagtttatccattaaacccgttttttgaactttttcgatgaagcccgcaccgatattgtagccaatgaataacccgtaataccgtgctaaaacagccggaatattgaagattaacaggaataacagcggccctagcagattcccttgaagcgctaaggaagtcccaattcctgtcgcaattacccgcaacgtcccccagaagaaggaatcccctaagccacttagcggacccattaacgcaatcttgatattgttaattgcatctgtgtcaaaattttcatctaatgccgcttgttcttccattgctaccgaaatccctaatggaaatgtagaaagccacggcgttacattataaaattccaaatgtcgtttataggcgctcgttaatttttctttactgcctttatagattttatttaacgctggtgtcattgcaaacgagtagcctaaatttgattgtcgttcataattccaggcccattccatcgtgaaggagcgccagaaaaccttcatcaaatcttttttcgagattaaactagaattcttcatcttcataatcgatgcctccattcgttgtacttgcagcaactgtctcgcctttatgtccattattgaaagctgagtagccagttaataccaatgcaagacaagccccaaagatggcaaccccagtaacagggactttcatataaaccgctaaggcaaatcctaatacaaagtaaattgcattgtgtttattgaccattaatttcaacaataacgcaaacccataagctggtaataagccggtcgcaattcctaaaccatcgatgacaaattttggaataaccgctaataatgacttaattactggactcccaacgatgaaagaaattgcaacgattaagccgattggtaaattgattgagaagaacccaccgaacaattgcatccgatccatgccctttgaattaccctcggccgcgtatttatctgccttatgaacaaagtatggcagaacaaagatgaagcacagattcttaataactagcactaacgatgcaatcggaatgcccaatgttaacgcaacggctgtactcttaccggcaccaatggcaaaggccgttcctaaaatactacctgaaataatttctggtggaatcgaagccccgattgaaaatgaccccacaaaggccagttctaaggttgcccccatgataattccggttttcatatcacccataattaatccagcaatggtacacgtcacaagtggtcgcgataacattgatgatccaaataaatattcagcattcgccaacatcgctgttaacgctaataatatggcaatcaatatatggttcatgagtttatcctccttttattctggtagtatcattttcttttcattcggtacttgttggataaagacgtctacaccagatttagaaagcgcttttaattgatcgacttctaaatcggttaagttaaccgccttagaataattcttcgttccttctcgttgttttgtgcccccaacgtttaacaatgtaatcttatcgcccgttcctttgattaatttctccgcatccgctactgattcaacaacaattaacaacttatatttatcggttgcgccagaattaatagcactaatactgtcatcaattgatttcatcactaacttcgcttgttctggcttcgccaagcgaattgctgatttacgaaagtcatcccccgccacactatcattagccactaaaatcgtattaacatctaattcgttaaaccaagaaactgcaacctgtccatgtaataaacggtgatcaattcttaaaaattctatcatgtgaagtcccccttaattaaaatcaatattaaattctgttgtatcagctggttcatagcgattcgaaatcccaatcactttatgattttcagcgtaatactgactgctcaatttaaagagcaacgcatcttcttctagatctaaatatttagcatgcgttgatgccatgctgacgagctgtaaatcttgctgcattccgtagaaattttccttagccgaattgacaagttcgatagtattgaccatctggatatccgcaagactcaaagtcggatataactgctgcggtaaaataatcgtttcgtaaacctgattctttttttcttgataaacatgtttgatggtatacaacaacgcgttgtcactgatatcaaataattccccataatatttatccgctttgcgaagatgaaattctttaatctgttttgctgcgttgcctaagttattattcttcatcacccccgtcatttctaaaatattttgcgaggaaatctggggtttaacgtatacccctacaccgtttttcttgataattagttctttagcaactaaattatctaaggctttccgaattgttgtccgacttgcaccaaataattgctgtaattcagcttcacttggcatcaacatcccacttttaaattcgctacgctgaatgcgagtttcgatttcgtctgaaatggtttcaaataagtattgtttcatcacaaatcaccatcctcacgataatcaaaaatatttttcgcatctaatcggtaacgaatttgattcccaatcagatactggacactatattcaaccggctcatcatcatgatcgtaagccaagcttgttacaatatataatggtgtcttctctggtatttctaatatgatagcctgtttcttatcggcatatcctgctttaatcgtttcatgcccgtagcctaagaccaccccatattgatccttcagtgtttgataaagggaccgattctgaaaagagatctgctcaatttctggaaagcgttcttgacttaaaaaagctaattcgtacgaaatgggtttcccattaatcattcgtttccgcggtagttcaaatacatgatctgccttcaaaaatcgaacaacatcttcttcgactggttcttcggtttgtaagacctcggtttgaatttcgtctggatttaactccgttgacattgaactcattgccagcatgttaatcacatgcttattgttaactgtcattcccacacgtggctttttttcaattagtccttcattttggaggactgataacgagcgccgcattgctgttcgactgataccatatcgctcagccaattctctttccgaaagattagcgaaggctcctttttggatatcgtatcgcaatcgttcctcacccaatgttgcaggtgagatttctttatattccaaagcgatccttcctttcaaattttaaagattaataactcttacaacctaattcactaaattaaaagatatagttttttatatttttaataccaaagtcattgtaagcgcttttttattttgtgtcaatcgttttgaaaaagtttttttaattggcatccattagttgattttgagtattggaaaatgacgttctagataaccagtgcattttaaagtttctaataatttattctcattattgcacattaaatttaatgaatatatttcgtaattggcttaaaaacccgttaaatcggctttaataaggatttttaaagaactacttctctttaacaactacatgcaacagatttgcatatcgataaaaaacttgctaatattaactattatcggtaatgttgttaaatatgtatattaataaccattaattcaaaaacaatattaaccgtagattgtcggccatcactcgtcacataaaggagcgcgagacagttcttaaccgaataatgctaaaaatagtttctgttaggagtgctacctatgaaagatttctttttatccactaagtcaattacgttaatccgtatattagatcatattatccaagccaatgaagcacccatgcttcgggatattatgtatcatttctcactttctaaattaactgcaatttgctacttaaaagagttgcaactagaccttgctgaattagacgccaatattcagctaacaacagtcaataaccgctatgaactcgattatcctgaaggaatgtcttctaacgcgattctttttgaacttcggttcgcttacattattcgaacaaccagctttcaagtgatggacgcgctttttaaacatcattacaattcggttcaaaccttggcagaagcaacaaatttttcgacctcatcagtgcaaaattgtattaaacaattatgcgtctatttcaacaccttctacgtcaccatttcatttagaggtaagcaaaacatcgttggcgatccgttaaacattcgcttgttgatgatttatacttatacatctatttatcgcggtagtgtgactcaggacttcatgacgacacgttcccagtatccaaccgcgcttaaaccacatttaagtttttcgcagcatcatcagattgaagcactggaatcggtcacttattttgatctcattcaaaagaagtattcgatcaccttaaaccctgaacttcaccaactatttgaagcaattaacaagactaatacgattacccttgaattaccaggcttacctgaacagactttgcttgatgaatcactgctgtttagctttttattgcgcattgccgttgctaattacgatacagacaccgaaaaaatcaaaattactgaggctattttggcattaaatactgattttacaaacgatgttaatcacctactattggacttctttgaaacctatcagctgaactacactaaaactagttttctgatttccttttattatttagtcattaccttcatttatctcacctatattactttcgatatcaccgactttgtgatgtttaatgacacggcctcaacgttcaaacaaatcgatattgattcttatcaagaaattgatcatttaaatcaatttttagctgaaaagaaggctcattacacaacattaccagcgaattcaacgggcactctattaagcgaaatgttcttctttttgctcgactacaatccccaaatcaaacccttaaaaattaatatccgatacactaaaaatttctatgcagcgacgatgattaccaaaaatctacaaaatgtgttcaggtcttcaattgtgttcactgattagatcgaagacgcagacctcatcatctctgatcactacgaacatgacgagtctttaaacggacaattcttcttattcagaaataatttcgaaccagacgattgatccttattactgaagaacgtattagcgtatatttatacgaattcttttcataaacgactgaattaaaaaccaccgtactgctaaacagtacggtagtttttgcgttattgattttcaagttgttcttgcaaccattccagattaacttcatgatgccgtttagaattagtcatcatcttgataaacatcggttgcaagtcagccggattggctagtgccgcgtcaatcgcacggattttagcctgtgtctgttcgatttggctttttaacagcttatccatctgttccggtgtcacttgatccgtgaataatagtggtgtgtagaacggaaacgtaatcggcttattctggcgaccataatgggcaaattgttgctcaaaagccgttatgccagcggccgttaattgatagcgattcttttcccgcttatcgggcacgtcgtccgcgactttttcgatcagtgccttttctgccagctgctgcaagttatagtaaaacgagcccttcgtgaagttcacgaaaaaagcgtagtattggctttccatgtcagccaataattcgtaaccatacgcgcccggctttttctttagtaatcccagaattaaaaattgaatcatttactagtctccttgcccgttagctgtgcaataaagtcggcataactcatttgaccaaatgcaaaatcacgactcaatcggtacatcttttcctgctgtgattctgggcgttgatagagttggtctagttgaaccgcttcatctgcaaggacgtcaggaacatcttgatgctgttcgaaagcttggaaataacgaatcccaaaacgccgttgcgaggccgcgtcaatgtgaatcccatctgggttagccgttaattcggcagcgttgaccaaataactgtgtggatcttgcgcgacaacttgcgccatttcgcgattaatttcgttaaattccgtggcgctcgcgccgaaccctactttgcctaaaaaggctggcaattgacccgcaatgattggtaaatcaggttggcccaatgctgcacgtaaatgattgaagaccgccgtcaacttggtcgcatacgtttgatagccaccatttaaactgtcactttcaccttgatgccataacaccccgattaactcactagattcctgtgcaaatttcgcctcagtaatcgcgtgacgcatcaaaagttcgtcgctcgcccactcatcgatggtgctcccaccttccgcgcaggggattaaccccaattcttcatcaggatgagcttgcacccacgccgcagcaaatgacgcagccggcccaacacccgcaacctcccgatcaaaatgaatcggttcggccatcatttgccagcgcccattgcgcagcatcttcacgcgctcgtgccgcaatcccggcacatcttgaataaatccccgcccagccatattcgactgaccgactaataaaattgacttcatcataaaaatcctcctgaaactgatttttatagtacagtctaattagactatgaattcaaaaaattctaggtaactaataacttagttacctagaatctaaataaaaattaaattactctgacaattctgggtgatcatttaaaaattgtgctattggtctcaaaatagttcttgccaattgaactggaacagcattaccaatttgtttatattgtaaattaagtctattatttttttgtactgtactcttccctccatcactaaatgagaaccaatcgggaaacgtctgtatacgcgctacttcccttacactcagtcttctgtttatttcccctgaaaacctccataaatctttttctaccttaaccataggtttcccaccaggccacataggtgcctgtctgccactggcctgaatagtaaaggactgttcatcccaacctttcttcctattacgagacatatacattgatgaaaaaccaccatcatatacatcttctggatctgttggtaaatcccctattgcatcacgtaacgtaacaaacggaatcttattctctccatgagttgggtctggaagattgtagctccagtcatagttgtctttaattttatctttatgcgtgccgattaaaataactcgttctcttaattgtggtacaccataatctcttgaatttacaagatgagcttgtacatcatatcctgcagatgcaaaatcctggactacctgtctaaatacttcaccttttgctagagtcatcagccctttcacattttcggctacaaaaaattctggctgcgtttctaataatgcacgaataaaatgtacatataagaaattccttggatcatcaattaatcgcggtcctgctgcactaaatccaggacacggaaatcctccgaccattatttgacaattaggaaaatttgaaacctgacgtatgtctttactgtgtttaaagataccttcttgaaaattctgaatatatgtttcgtttgcttcagtaaatagatcatttgaatacaccgtattaaaaatactatctttacgaatatcttcaaatgaatttctttctttaagtgcttcatcaacacttatactacctttattaacatctaaaccagcaagttccaatcctaaatccagaccaccagctcccgagaatagactaactacattgaatttcctattcattaatctaatgttctttattagatcatcctcatcgctacttatttgtattttttcacgttcttcattaattttattcaataaaatacttctcacttcatcaggatctaatgttgctgcagatataaacgtactcatacttcagtcctccatatagttcgttattttatggtaacatattatatttaacttggccagttctaatatttgttacataatgtacaggacaatacttttattaataaggggttaattatggcaaatcaatcgttgaatggaaaagctttcgaattcgcatgtctctctgctctaataaaatttatagaacaacctataataattgataaaaccgcacctgcatacatcactgtagaaaaagacttcaattccctttcttccgacgatcaaaaaacaatgattacagctgctaaaaaaggtattcaacaggttatagattatgaaccaaatttatctatagaaaccacacctctacatttatatatccaaactgatagcaaggggaagactggagatgtaagagatattgtttgtataaagcccgaggagaattggcaaattggtatctcttgtaaaaataatcatcatgccgttaaacattctagactatcaccaaaaattgattttggaaaatcttggatgaatgttaaaaatacagatcagtatcgtacagatacactacctgtatggaactttttgaaaaacactatcgaagaaaacccagatacaaaatggtctgaccttaaagaatataaagagacattagtttacgcccctctcctagaggcgttctctaatgaattacggattctatgtaaagatacgcaaaatatcaagaatcttttctattatctattgggttcttatgacttctataaagtaatagccaataaaacaaataaaaatacagaagtaatgatatttaacttatacggtactttgaataaaagcgttaacggcataaaaccaaaacggaaagttcataaaacattactaccttctcgattgtattccatagaacccgcccaagataaaaagggagtcagcccaacaaccatcaaggctgtttttgatgactggagtttaagttttagaatccacaacgcccggactttagtggaaaattcattaaaattcgatattaatttaaaatcagttcctactgatcttcaaaatatcatctctccttgggaataactcattaagcaaacgtcttcatacacataattgatgtataattctaccatcatcttgtcttaactcactttgctcctatcctagtatttggtacataaatttctgaacagttgtgccataattaataaaacaagataggagcattccaatgaaacgatatcaagatgattttaaagccagcattgtgaagatgcatcgtgaagagaaaagatctattcgctcgctttccgaggaatacggtgtttctccagccgcaattcataactgggttaaaggcgctaaatcagttgagctagaagacggtactgaagtaacgtccaaagaattcaaacaacttcaaaaggaaaatcagcgattaaaggaggaacttgaaattttaaaagctgcggcggtgttactgggaaagcattaggacgaattaattgccttgtcttcatagaagatcagttattgcgacaccgcttatcaattattctttcggcactgaaattaccgcgcagcacctattaccattggaaaagatatcaacctagtcaacacgaacgtgttgataatcagctcaaagaaaaaattaaattgatttgggaaaataattatcgtgcctatggttatccacgaataacgatggtgcttcgcaagtcaggcatctgtgttgggtcaaaacgaattttacgattaatgagggaaatggagattcactctttaatgaatcggcgatttaaaaaacctggcactcatgtggatcattcacaacgccccaatttaatcaagcaccagcccaatgcaaggatatggcgtgctgacattacttatttggaattacgtccaggaacctgggtttatctcagttctatttacgaaccaaaggttcatcaagttcttgctttcaagattggtcgtcagatggaggcgacgttagttgtagaaacgattaatcaggcgcttgaatgtcatcaaaagccacaatattttcactctgacatgggttcacagtacaccagcaacgaagttgaaactttacttgaacggcatcagattagccactcatactcaaaacaaggttatccttatgataatgggccaattgaagcttttcactcattgttgaagagagagtttgcctttcaaacaactttttccaattttgaggacttggtaatccgaacctcaaattacatcagttggtttaattccgacagaattagaacgagtgtttagaaaaagatgtgccatttattgacataggagcactttatattatctttcatcggtacaatactaatatgatacttatactttcatctggtatgtgctaaaccgctgtcgcattttactttagacatgataaaaattcctttcgcttttagatttggttagtaaccattctctagtatcgcgaaaggaatttttacgttacagcgtattctaactcccacacctaaaagcaattcaatctttgtatgtccatcctctgtattatataaatgaggctcctatgtcaagaatccggacataaaagtacgaacaaatttgactttcaatttaaattacttaatttaattttcggagcccgaagttttagctattagtaactttttttactcagaaaaagtgagtcctttattttgaaaccgactatcgatcctagcactttttaattcgatcgcaaaaataatctctttttcctgttcttctttggataaactctcaacatagcctggtacttgtttttgataggcctctgctatatcactaaaacgatactgagttcggtataccttgagccggttactcgtgattcacaattcttcactagtcggtagcgtaaaaattgcggctcgccccaaatcgagttcactgactttcgacgcttcggggtcggtgccaaaataccagacattcggtatcccatcaagcgtgacaaaattaatctgtcgactagacggttgtcccaggttgttcgctgtactcagcaccattgtattaaactgcttaacctatttacgaaactcgcttaagttattttgatacagctctaaactaaccggctgactatcaatataagcaatcgcatcatcaatcgtttctagtgccggattagcctctaaataataaagaatctgtggaataatgtgggatatttctcgttgatgataataaaaccgcaaccagcgattagaaactgataaggcctctgtataacgcttatcaattcgccgccgatagcgttggacgatatattttaacggtcgatatttaatcaacttttgaaagaatagtaatatggtgcaaatgactaagtcaatttaatagattatcgtttccataaggtcattcaaacaaaaaaagagccccgctttcgcggggctctttttcacagtttaacgctgtgcttcatcttcgtgtaacttacgtaaaagttcgtcgatatgttcaccataacgcactgaaccgtcttgttcaaaggtgatttctggaatcttgtacaacttaatccgttggccaagttcgctgcgaatcaatcctttagctttatctaagccagcttgtgtcttttcagcgtcacttgctaagccagataaaatgctgtaataaactttaacatgttgtaagtcaccactgagattaatatcagtgattgtgaccccttcaactcggggatcacgcactctttttaataatatgtcatttatttcgcgttgaatttcttgttcaacccgaccaacacgatgtttcattgcttgtcctcctgtaaattaattatttaacaggtacttcttccatcacgtaggcttcaatttgatcatcaatcttaatatcattgtaatcttcgattgtcacaccacattcaaagccagttttgacttctttaacgtcatctttgaaacgtttcaagcttgaaagtttaccttcataaatcacgataccgtcacgaattaagcggacaccactatcacgttggataacgccagtgtcaacgatacaaccggcaattgtcccgatcttagaaacattgtatgtttcacgaacagttaattgacccgttactttttcttcgtaaactggttctaacatacccttcatagcagcttcgatttcttcgattgccttgtagatgattcggtgtaaacgaatatcaacttgttcagcatcggcttgaatcttagcttgtggtgttgggcgaacattgaacccgatgatgatggcgttacttgcagcagctaatgtgacgtcactttcgttaatcgcaccaacggcttcatgaataatattcacgcgcacgccttcgacttcaatcttccgtaaactaccagccaaggcttctgttgaaccttgtacgtcggctttgataataacgccaacttcttttaattcgccttgtttcatagtttcgaacaagttatctaatgtgacagggtttgaacggctacgttccttcaagagcgcacgtttggcacgttcttcaccagcagcacgagctgttttttcgtcttcaaagacaacaaaacggtcagctgcttgtggcacatcatttaacccagtaatttcaactggttctgatgggaagacttccttcacacgacgaccgcgatcatttgtcatgacacggacacgaccaaaggtattcccaacaacgattggatcaccaatcttcaatgtcccttgttggatcaagagtgatgcaacaggtcctttacccttatcaagacgggcttcgataactgtcccaactgctttttgatctgggttagccttcaattcaagcacgtcggcttcaagaagcaccatttcaagtaattcatcaatgttttcaccagtcttagctgagatcttaacaaagatggtatcgccaccccagtcttcaggaacaaggccgtaacccatcaattgttccatgacgtgatctgggtttgcgcctggtttatcaatcttattcaccgcaacgatgattggggctttagcagccttggcatggttgatggcttcgattgtttgtggcatcacaccgtcatcagcagcaacaactaagatgatgatatcagtgatatcagcaccacgcgcacgcatgttactgaaggccgcatgtccaggtgtatctaagaatgtgattaaacgatcgtttaacttcgtttggtaagcaccgatatgttgcgtaatcccaccggcttcaccatcagtcacgtgactgttacgtaagttatccaataaggttgtcttaccatgatcaacgtgacccatgattgtgacaactggtggacggctcacaaggttggcatcactcttagcttctgtttcaaatactgaatcgatatcagcaatatccacttccactttttgttctgcttcgatgccgtaatccgttgctaataattcgattgtatccttatcaagtgattggttcatgttaaccataatccctaacatgaataacttcttgataatttcagctggttcacggtgaatcttcttagcgatgtccgcaacgttcatgccttcagagtaaactaatacttctggtaatggccgttctttacgttgtggcatttccttcttagcagcattttgttcagctaattgttgcttacgggtcttcttacgtttcttattgaaacgttgttgattgttaccgtagctgttatacccgccgccacgtttcttatctggaccaaagttctttggcttgcttgctgtattgtttgatgctggtttagcagcactcaccgtattagcttgcattttttgttgcatttcttgtgccgaaactggccgactttggttcgagttgttattaggacggctgtttgtattgtttgctggacggccgttgttgttgctgtttgcaggacgattatttgtcgtcgttgggcgtgcgccggctggcttgttgccggctggacgactgctgttattaccgtttggtttagcagctggccgtgggcggttactttgttgacggcgtttcttttcgtctgcttcgcgttgttcacgttgttgttgaatgcgttcttgcgttctttgacgacgtgcattagcttgtgagatttgttcttgcaagctcaatggttggtttgacccagctggacgcgtattgccgtttgtccggttagccgcattattgttagggcgaccattattaggacgggcgttattgttgttaggacgaccattggcattgttgcggttttgaccatttgctgcttggccattccggttgccttgtgggcgttggttgtttgaacgaggtgctggtttgctgctagcttctggacgacgacggatagcggctttgttaatcttaatcttaccgttatctgttttttcgcttgcctttggtgcagcaggtgctgcaccggctggcttgctgtcagttgtcgttgcagctggttttgtttccttatggaagatggctctcaaagctttttcttgattgtcatcgatagttgccatgtgattttttagatcgtaaccttttttaacggcagtttctaaaagatctttgctggcaacgttaatttcttttgctaattcatagatacgttttttacccatatcttcacgctcctttattatcccagtagcgttatcatctttttggcaaacccggcatcaacaaccgcgatggtggctctatgtaatccaattgcttgggttagctgggccgcggtatacgcttttgtttccgggatttcgtagaaatgactcttatcagtcaatttcttctgtgtcagttggctaatgtctgagccgataaaaaccaatttcgctttttgctgctgaatggcttttaggacttgttcttcaccactgaccagttgccgtgctctcatgcaaatacctaagagttgtaataaacggtctggttgttcactcattttcgttctccaaataattctagccgagccttttgatgatcaacatattcgaataattctgtataaaatgattctgcaacgtcaatcccaaacgtcttttctaaaattttcttgctttgggcggtcttgattgcatcaggttctagtgaaacataagcgccacgacctgatttcttaccagttgggtcaatactaatctcaccttcggcagtctttacaatccgcaccatttcttttttaggcttcatttcttgcgaaataacgtcttttctcattggtacttttctttgtttcatcatgaacacctcacttattcttgtggttgttcttcagaatcaacagcagaatccgttgcttggtcttcgaagccttcaacagcttctgttgtttcttcttcaaaaccttcaacgactgcaccttcatcttgactgtcgtcttcatcaacgaattcgacttcagattcaggtttgatgtcaatcttgtggcccgttagcttcgcagctaaccgtgcattttgaccttttttaccaattgccaatgacaattgataatcagggacgatgactgtacatgtatgttcgttatcaccgttaaattgaacagcgatgacttcggcaggattcaaggcattggcgatgtagtctgaaggatcttcttcccacttcacaatgtccatgttttcgccgtgtaattcattaacaactagttgaacccgttgtcccttaggcccaacacaggtgccgactgggtcgacgttggggtctgttgaacgaacagccatctttgtccgatcgccagcttcgcgagcgattgagacaatttcaacggtgccgtcataaatttctggaacttcttgttcgaataaacgtttcactaaatcagggtgtgtccgactaacaaagacttgtgggcctttagttgtgttttccacttttgaaacgtaaaccttaatccgatcatgtgcttggtattcctcgtttggaatttggtcttgcttgcttaaaacagcttcgatcttgcctaagttgacatagatgaacttgttatcgcggcgttcaacgaccccttgcataatttcgttttcgtattgactgtattcattgtaaatgatacttctttcagcttcacgaacccgttgcataatcacttgtttagcagtttgggctgcaattcggccgaagtcttttggtgtgacttcaaaacgaattgtatcgcccacttcgtatgccttgttaatttccaaagcatcttggtagctcacttcaagccgtgaatcaaacacttcttcagtgacttctttgacagcatagacgtggatgttacccttcttttgatcgaattcaacttccacgttttgtgcttgaccgtaattccgcttataagcagaaacaagtgctgcttcaagggcttcaataacaatctcttttttaacgcctttttcttgttctagcgcatcaagtgcacctaacatttccttgctcatgtaactagcctacctttactaaaattcaattgctaagcgagctttggcaatttccttacgattaaacgttacttctttttgacgcgttttaattttaatcactaaagttaaagtgtcatcatcaagggcttttagtgtaccttgatagattttctcgccatcaacagcttggtataacgagatatgaatgtattcgccaagtgctttttggaaatcggcttccttctttaaaggacgctctgcaccaggtgatgaaatatctaagaaataagcctgcggaattggatccgggtcgattgaatccagtttctcacttaacgcatcgtttactaaggcacaatcttcaaggtcaatgccatttggtttgtcaatgaagacgcgcagataccaactgctaccttctttaacaaattcaatgtccactaattcaaaatggtgttgatcaagaatcggcacgatcagatcgtgaactgtttccacaacggtactcaaatgattccctccaattcatttttatatttcagattagacgtgctccaataaaaagagtgagcatttctgctcactcgctctgaagtatctaattactgataacaatataccatatttttcatgaaaatacaaacaaccgctttaattttcagtggttgcgacgctattttgcgtcttacccgtcgtcaagatttcatggaagttttcaaaactaatctcgaccatgttcttgagcgcttcgtcagtatttgaaccaacgtgtggcgtcaacaagacacgggggtataaatcaatcaattcttgggtggttgcatctggcacaggttgatctgctgggaattgcttgaagaagatttcgccttcagctggtaacacgtcagcggcgaatgcaccaagttgatcagctttcaaagcatcgataatcgcacggttatcttgcaattgaccgcgggctgtattcaccaagattgcatcgttcttcatctttgcgattaagtccgcattgatgaattggtcgttttgaccagcgaagtatggaatgtgcaagctgacaatgtcactttgggctaataattcatccaagctgacaaaatcaagcacttccttagcgatttctgatggatataagtcataacccacaaccttggcacctaagcctttgtataacttcgcttcggtgtagccaatcttgccagtcccgataatcccaaccgtacagttgcggacttctttactgaacatcactgggctcacacggaaatcatgatgggctgtccgattcgttgtgtaagtggtgtgacgcaacaatgacatccctagcgtcaatgccaattcagcaatcgcgtttggcgagtaggctggcacgcgagcaacttccatgttgtacttgcctgctgcagccaaatcgatatgaccgtaaccgactgtccgggtaaacacgtaacgaatcccgtattcattcaacttcgctaagttttgcgcatcagcggtacagttggcacgtaacaagaccgcgtcatgccccttagccgtttcgatattgtcgtgcgtcaataagtcttcaattaacgttaaatcataatcgtagttgttatatttattgaacgtcgccacttcattcggacgaacgccgtaacaagcaattttaaacatttaatttccctcttcctagaaaatcccgatttggttaatcacttctaaaatcactaaccagactggcgtcatcacaacagctaagaccgttgatagtaatgacgcgttcgatgctaagaccgcatccttgtcaaaactaatcgcgtaagcagcggcgaccgttgccgttggcgttgccatcatgatgacaatcgttgccaaactgatatagctaactggtaaaatgtgggtcattgttaagatggccaataacacgatgtttaaagcaggtactaaaatcactttgttaatactataaatccatgatgtcttgtccgaagcagcttctttgaagctgatttcgccaagtgttgtcccaattgctaaccaagctaatggtgaacataagccagctaagtacgtcattggtttgaacaaccatggcgctgtttgatcaattcgtaagaaagccactgaatgcccagcaaccgccacttgtggtaatgcgccttggattaaccagatgattaaccccgcaaatgtggcgatcacgattggatttaagaacatgtttttcaagttcttcgattccatcttcaagccactcatcttgatgtacccatatgagtataagaacacgcgataaccaatgttgaaaattgagctatacataacccctttagctccgaaaactgctccaacaattggaatcccgaagaacgttgttgaaccaaagatggtcaacacgcgcaatgtatcttgttgatcacccttaaagcgtaagtataacggttttgaaattaaaattaaaataatatagatcaagaagccccaaactaaaacgttgatgccttcttttaaagtcttcccattaatatcctgcatgaatgagttgaatgctaatgctggtaaagcaaccgttaaaacgacttttgacagaatcttcccaaatttatccgtgaagatctcgcgtttgcggcagtagaatcctaataaaataataaacactgtcgacgtgatcgaactcacaatatccatgttcgtaaacgtcttcgttaaaatatcgccaatactcatctgtactctcctctgttataacatttagtccgctgtattataacacggacaactggtatcgattataacaagaaagtaacggaaaagaaatagggcaaaagaaaaagagtgaaaaataacttcactctttctcagacctaaattttgtattcattttcattacatgctatatattaattatctaaactgccaaggaggccttctcatgcccatgcaaagcatcttcaacatgtctctttccaaaatctaccccatgctcgtccaaaaagccgaacgcaaaaaccgcacccaagccgaagtcaatcagattatctgctggctaaccggctactcacaaaccgaactcgctgcccaactcgcaaaagacatcccctaccaaacgtttttcgaggaagctcctcaaatgaatccgaattgcgttctcatcaccggcgtggtttgcggcgtccgcgttgaagccattgaagacccactgatgcaaaaaattcgctggctggataagttggtggatgaactggctaaggggaagacgatggagaagatactacgagaataactaaagcactcataaaaataaagccttagggattagcttgaaaaactaatccctaaggctttattcattacacatctaatcttttaaaaactgttgttgaactggtttaaacaaatttttaactgtcccaaagcgaggcggataatcattagagccaccagactcaatcactgttccgtctgcataggtcgcggttactgaccattgctcaccatcaatgatagactcgttaatataatagtcagcccacttcggaagttgcaatcttgaaagtcgattacgaacccgacggatagtatctgcatccaattgaaacctaatttcttcagggtgaataaattcatacgttaccattctgccaatcatcaaaccagtttctaaatcaagactatatacttcatgcgggccaaaataaccatgacttgcaaattcaaatttagtcagtggattacgcattgaaaatcagctccatttcattgattaatcatcttcaataaaaaagtcttcatcgatatcaaatgttgtatattgcttcttaacattcacaccaacttggtattgcagcatcaggtcgctcaaccgtacgccattaatcaatacaatatgctggttctttgcatactcaattgcaccgttcgagaaattagaggttgttatgaaaacaccacggtctgatccaaaaccactcaacgccccaaaaaatgcctgcatctcatttcgaccaacgttgtttcccacttgataccttttagcttgaatataaaccgtactagttcccaaggcatcctgattaataataccatcaataccgctatcattactcttttgcgtcacaaaagcttgaccgtttgttcctttgtaacccattgcgcttagtaattcgacaactaatttttcgaagaagtatggcgttcctttacgaatacgatcaagtaaatcaatactaacggtgtcattatagtcctttacaatagggtctacagtttgtatcggttcaaccgaatctgaattatccgtcgactgactatcttcagttttttcaagattccctttttgttttaactcgtcttggtgttggataaattgtggtagcttgtggattatctcagaagttaacttaccgccgtattgctcgagtaattgtttacccaacggtgtaattaaatagaatcccctttttggccgttctattaaaccaccaattgttaattctgaaataggaaatgtcgttcgactatctataatattgacgtcagggtatttttctgactttaactggcgtagattatcaggcaattgcaaactgtttacaattgcctccgaaaactcttttcgtctaatcgcagatgactgtttactagcaacagataatgcaactggcaacattgcatcccaagttggtagtccatgtttgcatagctttaagttcttataatcagtttcaattgtcatctaagtaacactcctatttaatccataattctatctagttttattttacgctaaatcacaaagagataatatatttgcccttaaaaatgctatcgctgtgtataagaaagcatttattcaaataacagtaataaatattagtctaaatagcgtttacggattttgtcaaccatgtctatcgattgggaacaagtggaatttcaatccaaaattaaattaattggtggggcaacaccttttaaagataacccggagtattggaatggaaatatagtctggttgtcgtcacaagaaatcaagaataaatacgtctcaaatggaacatatacgataacaaaaaaggcgattattgataataaaactagaatggtagatgctggaaccccattaattgttactagaagtggaatattagctaagcgatttcctttaagcataccgactattgatgttgcaattaatcaagatatcaaagctttgctttttgatcaatccaaattaaacgtaaatttttttgtcgctgaactccaatcgaaagaagcatatattttaaagaaaatcattaaaaccggaacgactgttcagtctgtaaatctaccggatctaaataaattgattatatcagtggtatctgattttaaagaacaagaaaaaatcggagacttctttcaaaaattggatcatactattgcacttcagcaacgtaagttagatcttcttacaaagttaaaacagggatatttgcaacaattgtttccttctaaagataagtatcttcctagattaagatttaaagaatttaatggtgattggaaacaatgtacgatgggagaaatttttacagagcgaacagagagaagtggagaaggtgaactgatttctgttactataaattcaggtgttgttaaggccagtgagctagacagaaaagataactcgagtaagaacaaatcaaattataaaaaagttgagattggagacattgcatacaattcaatgagaatgtggcaaggtgcgagtggatattctccatacaaaggtattcttagtccggcgtatactgtgattactcctaaaaatgaaattgattcggagttttttgcttatgattttaaacgttttaatatgatacaagcctttaaaagaaactcccaaggtctaacatctgatacttggaatttaaagttccctacactcaaatcaattaagatcaatgttccacattttgatgagcaaagaagaatttctaatactttcaatcaagttgacaacatgttacttcttcaacaaacaaaaatagatcagttaaataaattaaaacaagcttatcttcaaaaactctttccataaaacaaacgtatgtaaaaaggtcgcgaaaaatcgcggccttttttgcttagttcagtgtcatcaagcactgcattattttgtcgttatctttactatcaagctctttgataatatgcagatatgttttttgcgtggttgtcatattggcatggccaagtcttttagccactgatgctagtgaaacacccgcatatagcaaaattgaagcgtgtgtatgtctgagaccatgcacactaatgacaggaatctgtgcttgtttacatttacgttctagataatgattcgctgtatcattatgtgttcggcgcgttctgtcgatgaaaattggttccttttcgggtaaatctttaattaaatgtgcgaattgagttgcgatttgccagtctaatgaaatttttcgaactgacgactgattcttagttgattgaaaaccaccgcggtaatgtttataattccatgttttatcgattgttaattgttgtgttctaaaatcaaagtcagatggcgttaaccctaatgcctcaccaaagcgcaagccagttttagctagtaataaaataaagtaatcccagttaacttcgtcttctagatttaagacaccaaaaagtcggcgtaactcaccctgattaagatatttcattttatggcgtctctgaacaacacctttgataattgctttacgcgtcggatctttctttaaataaccttcgtcaagtgcatcatagattgccgatttcaactgatggtggaaatccattgtcgtttgatgttcgtgcgtcgcagcataatcgtttaataattgctgataggctcgacggtctaactccgacaatagcagcgttggcgcaagtgttttaatctgacgttgcgttaattcatatttatcataagtgacctgcttaatcgcaccgcgcttatataacaccatccattcttcaaagtattcgtgaaaaagatattttctccgcataactaaccactcccatataaaaaatagtgaccaattttggtcactatcaaagtataaataataaatggtcgttaattaacgaattttgtttaagggaagagtttttggagataagattgttttaaaatttttagtttttccactttagactgctggagtgttatagtttgatcgagtttttgaaaaaaatttccaattttcttttgttcagttatttcttttgggacgtaaaattttgcttctttaacatcattagagttaattgattcaaatgttgaccctgaactgattctctcccagtatcctgagtattttattttctccaataaataataaatgaagtctgttcctttaacgctagcaacccctcgtcctataactacggtatattttgttttagccacatctccaacaggtgcacgtacacttaataataaatctcctttttgtgcaattttagttacttgtgttgtccaaactctgggatagacttcaccattttttatatccgcattaccttgtactaaaatccagtcattaggattgtcagtgtaattttccgatttgggtgactgccccattgtaatttttgcaatgccacttaacttattttgtttccaatcacctttaaatttgctgaatcttaattgaggagtaggctgacctgtagaaggaaacatttgttgtaaatgtccccgtttcattttcttaagaagctccaacttacgctgctgaagggtgatagtgttgtcgagttgtttgaagaaagaacctattttttgttgttctgaaagttcaggaaccagcacaggctgatttaaaaactcatcaacgactaactcattcatcattgttcccagttttgtcgagttaacaatcggataacgcattattggttcatagtggatatactgtttccagaattttataggcatatcctgagttggacgtaatgtcgtgaaacgcggtgacataatgccatctccaatgtcattcaacacaaatcggccaaacgcaaatcgtttactggtatgaccttcaaaagcaatgtcgccttcccgcagaactttataagatactagggagttttcagccgcaccattaccctctttcttaaaacgcatagtcgcaattgaaattgttctgtccgaactaaaatgatctttatttcgctcaaggttttttttgtacagctccccaaacttacgctgttcccaatcgtcagtaaagcctttaaaccggagttctggttgctttttttgctctttcatttaatcagactcctttttcgttgatacgagctgtgcttccatttctgcaaattctttttctaattttgcaatttctaaatcaatggctgcaatttcttttttgacttcatcaatgtcgattggttcttcttcttcaaaagtgtctacataacgcggtatattaaggttaaaatcgttttccttgatttcgtctaaagttgcaacatgggcgtatttatcgacatcttccctactcttgtatgcagcgacaatcttatcaacatcgctatctcgcaagttattttgattcttagctttctcgaagtcactacttgcatcaatgaatagaacgtctttcacttggcggtttttcttaaaaacaagaattgtggttggaatacttgtgccataaaataggttagctggtaggccaatgacggcatctaaataattcttttcaatcaatgtttgccgaatcttcccttcagcggcaccccggaataacacaccgtgtggtaatacaatcgccattgtcccttcattatttaaatggtagagactatgcaacacaaatgcaaaatcggctttggaagctggtgctagtttgccatattcgctaaaacgggggtcttttagtttcgtttcattattatcccattttgctgaatatggtgggttagcaaccactgcgtcaaaactccgtggttgatcgacacctgcttcatccggtccatctggccaatcactttcgagtgtatcagcattgtttaaagtcatattattaaatgacacatcatgcatcattaaattcatacgcgccaagttgtaggtcgttgtatttaattcctgaccatagaacttaattgctccggagcggatagcttcaggcaattgattgcgaacggttagtaacaatgagccagatcccatagttggatcatatactgagaaggcagtgttgctaggtgcgacatccatcgtgactaatttagcaagaatcttgctgacttggtgtggtgtatagaattcgccaccctttttcccggcactggccgcgaattgtccaattaagtattcataaatttcacctagaatatctttatcttcatcactcttatattcgatatcatcaactaatttgacaatattattcaaggatttagcacgtgccgtcgttgaactacctaagcgcgaatcaccgagattaatgtcgttaaagaccccgttgaaatcttgagcagcctcttgatttaagaccgcatttttattgaaattatcaaaaatcgtttgataatcacttggaataaccgtgctattttcaattcgttcatttaatgattgccacgtattagctggcgcaatcgcataacctaaacttgacgaaatatcttcaagataatcagctaattcatctgccgttgcttgttcgacataagcttgattaattgtctgcccatcggcaacatcaatcacattattagaaactaaatattgttcctgatgttctgaaaggtaccgataaaacataaaggctaagatataattcttaaattcaccagcgtccatatttccccggagttcattggccattgcccataatttcttagtgatgtcttgtaatgttgttatctcactcattagattcgttctcctttaattgcggatcttttaatgtattacatgtttatcagctgctaaataaattgcttcgcgtaatccgtttcggtacctgattttcgaaagtgcttggatatcagtatctaatgctaaattcttataactcaaacttgcttcagcaataatatctcgcaattggccagcatcatctaaatcttgttggccatattgatgcgtactaaatagttgtcgtaacccagcacttgtaatcacatctgtgatcccccactggtttcgaaattctaataaaatccgatcaatactaatctgattagcttcttgaataacttgctcactatcgtccaacttgacaggatatatcattgccatccctttaggtggatagtagccatcaaggatcgcttgtgtcgcgtttttaattttgtgcgcataattttggtcttctaagccatttgcaaattgatcaatatccttcttcgtcttctgagcagcctcaattttttcttcatgcatttcattcaagagtttttcaacgagttccgtcaagtaatcgtagttgacttgaacatctttgatgtgcgtcatctttaactcaatttgctgaacaggcactttatcccgcacactaatgtattgttttatttcattcgttaaaacagtggtcaattccttttcttgtgccggtgtcatccctaaagcgcgaattaaatcgtccggcgtatcatagttaaatccactatcttcttcaccatcttgcggtgtatattgtttaagtttcgacataccgacgttgtattgtcgcaataattcaaacatctcgtctttttggcgttcacttggtggtaattgattaaaaccatccgttaaatcatccagttggccgacaatcccacgaacctcttggaccatatttttaaagtctttcgctaaaactccagaatcgacgttttccttttgctgttctttttctgataaagtggctgaatccttgttggaataaatggctaatgctttattcattaatttttcattctggctcggccaccgataattaaccactcggccccaaggtttttctttcatatcagcgattcgatttgttcgagagtacgcttgaattagacctgccccttttaaagtacgatcaacatacaaggtattcatttctggcgcatcaaatccggttagtaattgatccacgacaatcactaaatctaggtagttcttgtcagttgcagttcgattaaggcgactcgtaacatcttgcgtatagccagaaacgtcatctaacccaaaacttgttccaaattgattgttataacacttcatcgcattgtgcaaattctgattggtttcgaccatgccatctttattcgttgtattttgactaaatgtaattgcaactttcagcagttggccgccgttctttgcatgctcttcattgacccgttgaaattctttaaagtacatcatggccattggcgtacttgctttaccaccaccaacatgggttgtaaatagtgcattgtactttccttcattagaacgattacgccaattcttaaaaatatcctgaacgactaagtgaacatgatcttcattttcatcatagaaactaggtgcaatttcgtcatccatatcttcttgtgataaattatcaattttatcttgaaccttttgctgttcccaatctggatgttgctttttataaaagtccggtaagtattgtgttttcatactttccgtatcaattgttgtctcaaaatcaactttaaaccctaatacatttcgatcagcaatggcttctttaatcgtgtaagcatgtaataattcgccaaaaatatcttcagttcgtaaaccgttagttgtttcatcaaacattggtgtgcctgtataaccaacccatgcagattttttaaagctcttttgcaatagttcaaaagcatccccaccagttgaccggtgtgcttcatcgacaataaagacaatgtgtttatcaggtgacttaaaactcttacgcttaaccagtgtttctagtttttggactgaggtaacaatgatattgttatccttgctctttaatttccggcttaagtcgttggtactctgtgtcccttgcacactgccagagcgactatcatcagccactgcaccatcaggatcatacgctttgtaattttcattcgtttgctttgttaaagcaattcggtcaacaacgaaaacaactttatcgactcccggcattcggctagcaagccatgctgttttaaaactggtgattgtcttacccgaacccgttgtatgccagatatagccaattttgtttagtcccatatcaaaatcaactttttttattttttgaatgacattttgtgttgcgtaaacttgataagggcgcatcactttaatcatttgtttattcttagtaccatccaaaatcataaagttagtcgccatttgatgggccattgggatacttagcattgaatctgcaaattcgcgccaattacggacaatcttgttgtctgattttcgttgccaattaaacgcgaaatctttgttaaatttatctgccgttgtattggccatatatttaacattattcggcgtaattgccaccagaatctgtaatgttgaaaaaatgtcagtgtattgattttctaaaatatattgatgcatctgattaagtgcttcattaacatcatgtgaatctcgtttctcttcaatttgaataattggtaagccattgattaataatgttgtgtcaaaccgccgttcttgcttcccagttagtaatgctggtcgttcaatttgattgacgacttgatagactgtattaccagcgccaatttgtttctgatcaaaaacggttaaaaacacatgccgaccatcatctaaatcaatttcaatctgagagacaccatttaacccatataaaaattgaccagcatcatacggtgtttttaaatctgaaatgattttcttcacctgattaaattccatgacacttagcggattatcgagtgtattttgattatgctgctctaaaatctgcttaaaattagcccatagttgttcagttgttctaatatcgtctcgatactgccacagcttagtcttcacaacataatcttttgctgtttcacgaatattacttttttgaaaatcatcctcagaaactgttattgtcccacttgtaatatatttaattaattctgattcgaaatttaattcgttcattcactagtcctttcgcaactgattcattgctatttttagttttaaatccgcactttgctttctaaaccagtttaatcgtatttggttgaaatacattcttccaattaatcgttgctcatctattggtggtagtttattaattctcaacgcttttagctgtgcaagtgtatatttaataaccatcgttccttgtaatgaacttacaagctgtcttttaatattgtgatcctgattcaacaagaaaactaaatagtgagtatccaaatcctgattagggattaatttaataaaattttgagtttgtagatagccaacatgcttttttccaacaacacttgcttctccagaaactaaattaaaaataatatcgccttctgataaaatcataactttatcaggggtccgaatttgacgtccctcattggacgatgtttctgactgaactaaatcagctttcaattcagattgcccataaatacaataactgggatcactttcattcattgaaacaaatagacgagattgtggagagccactcacaaattcaacaaacttactaagtttctccattaaatcctccttcaacacttatttaatatgcttagtatacgtcgaatcaaaagtttattcaacaaattttatgtaattttttaaaattgcataaaatgtgtgcaaaataaaaagccttcatacttctccgaaaatttattttcagtgaaagtatgaaggcttttttacatcatatcaaacaacgataactgattttcatcaggcaggtcattcaatacgttattttctgttaggtattcgatcagtgtcttggaaactttcccacggttggataagtcttctttggataagaatggcttttcttcgcgggcggaaacgatttgtttggcgacgttaccgcccaaacttgggacggcgcggaatggtgcgagtaaggtgtgatcgtcttggatcaagaagtcagatgaatctgatttttcaatgtcgaccatcttgatgttaatgccacgttccaaacattcgttggcgatttcgaggaccgtcaacaaattcttttccttggcgctggcttccatccctttatcggtgatttccttcatgcgggccttgacgccttcttttccttgggccatggccacgaggtcgaaatcttcggcacgcacactgaagtaagcacagtaatagataattgggaagtaaactttgaagtaagcaatccgcaacgccattagaatataggcggtcgcatgggccttggggaacatgtacttaatttttaggcaggaatcgatgtaccagtctggcacattttcgttgtcgcgcatggcttgttgccagtcatccggaatccctttacccttacgaacccgttccatgatgttaaacgacatgctatcatccataccccagtgaattaaatccatcatgatgttatcacgacaaccgataacgtcttttagagtgacaacgcctttgttaatcagttcttcggcattacccaaccacacgtcggttccatgagaaagaccagaaatttgcagtaattctgagaacgtcgtggggtgcgtttcttcgagcattccgcggacaaaccgcgtcccgaattctggtacaccgagcgtgcccattttcgaattaatctgctctggcgttaccccgagtgaatcagtgccggagaacaaggccatcacaccaggatcatcggttggaatcgtcttgggatcaatccccgataaatcttgcagcatccggatcatggtcggatcatcatggcccaggatatcgagttttaagatattatcatggatcgaatggaaatcaaaatgggttgtcttccaggctgcatcttgatcgtcagctgggaattggattggtgtgaaatcatagatgtccatgtaatccggcacaacaatgattccggccggatgttgaccggtcgttcgtttaacgcctgttgagcctttggcaagacgatcgacttctgcgccgcggaaagtttgttcggtatcacgttcgtaggctttgacatagccgtaggcagttttatcagcaaccgtcccgatcgtcccagcgcggaacacgttattttccccgaacaagactttggtgtagttatgcgcaaccggttggtaatcaccggagaagttcaaatcgatatcgggcactttatccccgtggaagccaaggaaggtttcaaatggaatatcatggccgtctttatcaagtggtgtcccacattcagggcagtccttatcggctaaatcgtaacccgaaccgacttcccctttggtataaaattcggagtaatgacagttgggacagcgataatgtggcggcaatggattaacttcggtaatcccggtcatcgttgcgactaaactcgacccaacggacccccgggaaccaaccaagtacccatccttaccactcttatacacgagcttttgcgaaatcaggtagataacggagaacccgttcccgatgatactcttcaattccttatcaaggcgggcctgcacgatttcagggagttcatccccgtataattcatgcgcacgattcatcgttaaggtttgaatttcatcttcggcacccgccatcttcggcgtgtacaacttatctttgaccggtgtgatttcatcaatcatatcggcgatttggttcgggttcgtcaccacgagttcttgggcaatatcggcaccaagaaaattgaacgctgtcaacatttcatcggttgatcggaaatgaacatccggtaattgtgaccggttcaatggattagccccacccattgagtgaatcaaaatcttccgatagattgaatcttctggattcaaataatgtgtatccccagttgcaaccactggtttatccaattcagcaccgagtttgaccatgttgcgaatgatttcttcaagcgcccgattatcgcgaactaattcacgttctaataatggtgcgtaaacggcttttggcattacttcgaggtaatcgtaatacttcgcgcgatcgcgtgcttcttggtagcctttttgcatcatcgcttcgaagacttcaccgctggcacaagctgaaccgactagaatgccttcacgtaaggcatccaagcgactctttggcaaacgcggcgtgcgataatagtattcggtcatcgatgctgaaaccagtttaaataagttcttcaacccagcttgggtttgcgccattaaaatcgcatgcgctggccgtgcttgtttatacgcatcgccaatcccaacgcgatcattcagttgattgacgttgaccatcccatacatgtcggccgcttcggcttctaatttgtataacaaataaccggttgattcagcatcggcgttagcacgatgatggtgttccaagttaattttataccgcttggttaacgtatcgagtttatgatttttgtattctggatgaagcatccgagaaacttccaacgtatcgatgacgggattttcaatctgaccgaggtcgttacgaccatagccagcattgataaagcccatatcaaacgtgacgttatgcccagctaagacagcatcgcccgcgaattctttgaacaacgctaggacttcggcttctttcttagcaccgtgcaccatttcattggtgatactcgtcaattgcgtggtgaaagctgatagcgggtgaccgggatcaataaattcatcgaacgagccaatcacttcgccatctttcattttgacagcggccaattcgataatcgaatcgtaaacggctgacaatccagtcgtttccacatcgaaaatcacgtattcagcatggtcgagtgcttcatcgcgcaagttatacgcgactggcgtgccatcgttgactaaattgacttcgacaccgtacaaaatcttaacgccgttcttcttccctgctgcataagcatctgggaaagcttgtaagttataatgatcggtcaccgcaatcgcggattggccccatttagcggcttgttgaacgaagtcgccaatcttgttggtcgcatccatttgtgacatattggtgtgcaaatgcagttcgacgcgcttgccattttcagcggtatcttggcgtttgggatggctaacttcgaccaaatcattggcattgaccacgagatcgcgcatgaagttatcttcttgaacactcccgcgcaccttgaaccacatgcctttatcgatggctgcgaagatactttcgtcgccgttatcccgggagaatttcttgaccgtaaatgatgatgagtaatctgtcatcttcaaaatcaagagctggcggccagaacgtaaaacgcggacttctttatcaaagacgaacccttcaatgacaacggaacgttcttcttcattgattgtaatcatctgacgggttggttcagcaggatttaagccgcggcccattgaaatcgggccatcgactggtttgccttctgattgacgtttttctttgagtgcttcatttttcttgatcgcttcggctgccgcttgtgcgcgggctgcatcttgttcagccttcttcgcttgaaaatcttcgattgccttttgtgaggcggattcgtcaatcaagggttgaatcgcaaacttgggaaaaccaagccgttgataaccagcttggattgtcgtttgcgcttgatttaagaagaacgtcttcacgatgtcgttttcgacaactaaaaagacgttgcgaccgtcgatatagggggtctctttttcacacaattcgtgcaacattgaagattgaatcccactatggttaatgacgtattcccaataagctgctaaaacaccgccgtccaattcagttgcatcggtggtgatttccactgaaacacccgcaatcgctttgaatgctgcttctagatactgttcaaacgttgtgtaaacagcatatggcaaaacggattcgaaatgtaatttaaaagtccagcgtttggatgtttcgtggacaacgacttgttctacttggccagttttgaagccaggataattcgcaacatccgcgggtaaatcaatttgttctaataatttttgaaacagtgcggtttgatctaatgccacaaaagggcctcctcatattcagaaagttaaataaaaggggctaggacaaatatcattctgtctcagccctttttagatgtccgaacatttataatgtaaacgtgctttttgaaactgcctcttgcgcttaactacaatccgcgaacgatcgacgttgtcgctcattcacgaatttaagttaatgcttggagccaaacggtttcaaacgcactctattcctaaacgtgcttttcaagctaactttctgcgcttagcgctgggaatcaaattatcgactgcgtcgttaattcgcttccctgtgctaatgctcaaaagttgaccgagcttgaacgcactctattcagcttctgttgtctctgaagccaataggatacttaatgaattaatcaattcatccttcttcacttctagggtttcacccgtcttacgtaatttaacttcgacgatttcctctgctgcttttttaccaactgtgatgcggattggtaagccgattaagtcactgtcggcaaacttaacgccagcccgttctttacgatcatcaactaagactgagtaacctgcttcttcaagtaagttttcgatctgttcagctaataagacttggtcagcatctttgacattgaccggtacgacatgcaagtcataaggggcaatcgcgcttggccaaactaagccgttttcgtcagcttgttgttccgtaatcgctgataagaggcgactcacaccgattccgtaagaacccatgataattggtttcgcacggccattttcatctaagaaagtggcaccgaattgttcagtgtaacgtgtgcctagtttgaagatatgcccaatttcaatcccctttgtaaagtgcaagttcccttgaccatcaggtgatgtttcgccttcttgaacgaaacgtaggtctgaataatcagctacggtaaagtcgcgcttgctgttgacattcgtgaaatggtgatcggcttcattcgccccaaccacggcattcaccatggcttcgacactgtaatcagcaacgatttgtaagtcttctggcgcgttaactggtccgattgaacccattggtgcgttcattgttgctaagacttgttctggggttgccatttctaagaaatcagcatctaagaagttcttcaacttcacatcattaacttcaaaatcgccacgcactaagaccaagaccggttggtcgtcagcgataaagagaacactcttgatgatttgttgcgctgggacgtctaatttagcagccacttcttcaattgtgtgggcatcgccagtcgctactttttcaagctctaattgcacatcacttgagttttgcttaggacggacactcgttgccatttcaaggttggcagcataatcactttggtctgaataaacaatcgtatcttccccaatttcagcaatcgcagaaaattccattgaatccttaccacccatggcaccggcatccccaacgattgcgcggaagtctaacccacagcgttcaaaaatgttggtgtaagcttggtacatttggcggaaagttgtatccaaatcagtttcattggctgaaaatgaataagcatcttgcatgatgaattcacggccgcgtaataaaccgtaacgtggacgatcttcgtcacgatacttcgtttggatttgatataacgttaatggtaattttttgtatgacttaatttcattgcgcaccaagtcagcgaaagtttcttcgtgtgttgggcctaagatgaagtcgcggccatgacggtccttgaacttgaataagttatcgccataggtttcgtaacgacctgattcttcccacaattcagcaggtaaaatccctggcatttgcatttgaacggcgtcaatcttgctcatttcatctttgatgatggcttggatgttttccaagacgcggaatgctaaaggtaagtaactgtaaacaccagcagatacttggtgaatatagccggcccgtaacatcatccgatggctcttagcctcggccgagttaggcacttcctttaaagttgggataaataattttgactgtttcataatctgttatacctccaaaaataatctaaaagaaaaagcgttgaatatcgttccatgtgaccaagaccattaagacgaccatcatgccgaccccgacaagggtgacaatgccttctttttccggtgagatgggtttaccgcgaatcgcttcaatcacgttgatcacgagcttaccaccatcgagggccggaattggaatcaggttcataatccccaagttgacggataagaacgctaagaagtagacgagcattgtaaagccttgactcgcgaattgggtcgtcattgaatacatgccgactggtccggctagtttattgagtgagaaaccacccgttaagaatgacccgagaattttaaaaatctgggtcgcattcgcccatgattgggtgaagccatatttcaacttagcccccacgctatggttgagtccagctgtcacaccaatttggccgactttccccttttgcccctcgactttcaccgctttaggtgtgatttcgagtgacttagtttgctttgcccgtttaacctggacattcactggtttattcggatattttgcaatcaccgagctgaaatcagtaaacgtcgtgacttttttgccagcaactttcactaaccggtcatccgttttaagcccggctttttgtgctggcgagtttggcatcactgtgccaacaatcgctttgttttgtgggacgccaccgtttaaaaaagcaaagagcgcaaacgccacaatcgcaaggataaagttgttgaacggccctgcgaagttggtcaacatccgattgattaaactagccgactggaattgaacatccacgggtgcgatttgcacttccgttccgtctgattcaacaatcgttgcatcgtgactgaccgaataacgctttaattcggattcgtcaccactttcatagccttcaatccataattctttttgcaagtcagtttttgcaatttgaaatgggacaccgtttaacgtggttactttgtcacttgtattaattttttgaacagtttcttgttcgtctaacagcaaggttgcttgcgtgccggcttcgatttcagattcatcatccgccatccccgccatgcggacatagccgccaagtggtaaccaacgaatcgtataagtcgtgccatttttgcgcgttgcaaataatttgggccccatgccaattgaaaattcacgcaccaaaataccagaacgtttcgccatgtaaaagtggccaaattcatgcaccactactaaaatgccaaatatgataataaacgcaataatcgccgccaatagagtacgactcccttctaaatgcgtatttcaatactctcatttgatatgaactgttatattatatcacgaattccttagaaacaagaaaagcgtttagcgcaaaccaaaaagttgcgctaaacgctagataatattgacttttaaaaacgtgctttttggttgcaacaacttccgcttaatctaaaatttcaaataatcctaaaaccgggattattcgaatttttgtattaatgctcagttgctaaccgccacaaacgcactctaaatcatgccaaacaagtgtagtagcggtaagacaaacaacatgctgtcaaagcgatctaagatgccgccgtgacctggtaagattttacctgagtctttaacgccataatagcgtttgtaagctgattcgactaaatcgcctaattgaccggcaattgagaagatcaacgttaaacctaacatgacaggcattgaataagcttgtgggaagaagtttaaataaatagctgcgaccactaatgctgataatgtcccgccaattgaaccttcccaagttttattggggctgatagctggccacattttattcttaccaaacatccgtccgaatgtgtaggcaccgatatctgtcatccagatgaccaataagatatacatcaccgtgtcaaaaccaccaatatttcgcgttgcggctaaataatggaagcctaagccgatatagagactggctaaggttgtgacacccatatcatcgaagttaacccggtttttcgtgaagactgtgatggctaataaaatggcaacgaagaagtagaataaatcaaattgtgacacacctgctggtaaccagttaaaggcgcctttgggtgaggctaaacttaacaccgctagtccggcaatggttgcatcaggtgagacaataattcgtttacgcatgatgaaaacttctgataaggcaacgagtgctaaaacggctgccgcgatatcaatgtaaataccaccaaagaaaatgatggggataaagatgattaaagcaattgttgctgtaatgacacgttgtttcataattgtatttcctcctatttaagaccgccaaaacgacgattacgtttttggtaagcgccgactgagcgttcaaacactgctggggtaaagtctggccagaattcatctacgaaaacaagttcgctgtaagcaatttgccagagtaagaagttcgaaattcgctcttcgccactcgtccgaatcaataattctgggtcagcatattcccctaaaaagccagtcatcaagtaatcactaatcaacgcatcgtcgattgcatcgacctcaattgtaccatttaccgcatctttagcaatctgcttaaccgcttgttggatttcgtcacgcgacccataattgagtgcaaagttcaaaatcatccctgtgttatcagccgtatcggccatcgcattgttagccgctttttgcgtcttttctggtaattcttgaatattacccatgactttcacacggacgttttcagcaatcaattccggcatgaacgtatcaaaaaaatcgaccggtaactgcatcaagaagttcacttcgtcatttggacgcttccagttttcagttgaaaaagcgtacaacgttaagactttaacacccattcgactggccgttttggtaatcgtcttaacgttttccattcctgctttatgcccagcgattcttggcattaagcgtttcttcgcccaccgaccgttaccatccatgatgatggcaacgtggttggggatgttggtgggatctagttgttgtgcgtctgtttttttatttgtaaacaccacatactcctccagtttcaataactctcatatgattgtaccaaaaatcacaggaagtgactatttaaaatcaaccgattgtcaccggcattgtacaaactgaaccgcccattctgcgctttttgagttcttcccagatgatttttatccacgattaagcctttaataccaacgattcccgccacaacgtactgttgccgctatcacattgaaatttattgttaaatattagtagattcctatagttattggcatgtaacaggttaaatatgataaactgatacataccttaaacagaaaaagggagtttattatgcgaaaaaccttcgaactctttcgacttgattggcgtcgaatcttcaaaagcccgatcgctcttctattaattattgccctcattatcattccatcgctctacgcgtggtttaatatctgggcgttatgggacccttatagtaaaacgcaagacttaaaagtcgctgtttactcagccgatcaaagtgttgtcattgctgacaaaaaagtcgagattggcgccgaactaattagccaattaaagaaaaacgacaaattaggctggcaatttacttcgagcaaaaaagaattagatgacggcgtaaaaacggggaaatactacgccgggatttacgtgcccaaaaacttctcaaaggatctcgttagtttcgtcgatggcaagattcaaaagccaaagatagtctactcatctaatgataagattaacgcgattgcgcctaaaattaccagtgcaggtgcaactacgcttcagtccaccatttcagaagaattcgtctcaaccgttggtaaaacattgatgagtaccctaaacaaggccgggattgatctcaatacaaatctccccgtcattaatcgtttctcgagcctcattctcaaaacagaccaacaaattccagaaattaaccaatacgcagaacaagtgcttaatctacaaaagaaactaccggaaatggcattaaagcttgcccaagccaacgagttcgcggcctttttaccacaagcaaatgccatggcgcaaaaagtagtcggcatcaatcaatacttaccacaagttgaagcagccggtcagctcgcaacgaaagttcaggctaagattccagaaatccaaagtgctggcaaacaagttgccacactcgattctgatttcgatggcatcgccaatactttaacgaacggcattaacgaagctcaaactggtttagatgtgttaaacaaaacacaaaaagtcttaccggacttaatgacttttagccaaacggcccaaggtgtcgcgggtcaattacaatcagacctaatccctaaactccaagctgctttaccggtcattcaaaaaacggtggatcaagggttagccattaccaatcaattggcaactaacatttcaactaatttaacggccgtcaatagtttgctgagtcaactcaaagaggatcccaataatgctgaactcaagcaagcgctcaaagaagcgctccagaacttatctgatcacaccgctaccttgcaaacccatgcgactcaacttgcgacaaccctccaaaacttgcaagacagctacaatcagtcagcagtggcgaatggtcaaccggaatcacatgcacttgatacaccgattaaacatttaaatacgttggcgacccaactcggcgtttttaaaggccaagttgatgaccttctcgcccattacgatgatttatcaattgacgatttgcaaaccaagattaatggtttgattcaatacgccgaccaagtcgaagacagcgtcgctaagattcaagcggcccatatcggtgacagcgtcaaaaatatgctcgaccgcttttcaacattaattgctagcggtaacgccgtcttaacacagcttaacggcgaagttttaccgaaactccccgcactcttattcaacacacaaaagacgctccaacaagccatcgactatctgcaaaaatatgctcagcagttaccagcgttgaaacaagaaattcatgacgcgaatacattattaaatggcaatctgggcacgattatctctggattaaacaccgcttctgacgtttaccagaatgactacccactactcaaaaataaactgcaactggcaaccagtttcatcaacaatgacttaccaggcatcgaaaacgacttaacaacgacgctcaacatggccaacgagaaattcccactcgttaaaaccgccttaaatgatgcgaccgacctcatcaacaatgattggccattcttacgtagcgggatccaaaaaggcgctgaggcgattcgcaaacaacaaaagacggtcgatctcaaagatctgattaaattgcttcgccgcgatgcaactaaggaaagtaatttcttagccaaaccggttgaactgaaagaaaaacacgtctacccgattaagacctatggctcagcaagtgcgccgttctacacagccctttgtctctgggttggtgcacttcttttgagtaacatcgtcttaaccaacttcgcgttagacgacaaacaaaagaaacagtacactaagaaacagcaatttattgctcgctggctaacctacatcgtcattggtgtcgcccaagccgtgattgtgacgcttggtaatattttcttattgaaggcctacatcgttgataaactaccgctaatcttattagccgtcttcctgagcatggtcttcatgacaattgtttacgttctcgccgcgatgttcgggaacgttggtaaaggaattgcgatgattgtcttggtgctttccatctctggcggtggcgggaacttcccagttgtcctctccgatcaattcttccagtttattaaccccattttaccgttcacatacggggtcaacctcttacgcgaaccaactggtgggatttacgcaccgaacctctggcataactttatcatcctagcgctctttgcggttgttttcttcctaattggcctcttcctgaaagatcgaatcaatccattctttgaaaaactccacaaagaagcgacgaagagtaaaattattcattaacgcaaaaaaagccccgccactgttgtggcggggctttttgcatccattagggattaaccttctgtgatttctttttctttgttcttggcgatttcgtcaatcttcttcgttgcttcattcgtcaatttttgaacttgttcttctaaatcatgcatttcatcttcactaatctcgcttgctttttcagcttttttcaagctgtccattgcatcacgacgtgcatttctgatggcaactttgccgatttcagcttctttaccaacttctttagcaatttccttccgacgttcaccagttaattgtggaattactaaacggattactgagccatcgttggctggtgaaatccctaaatcagctgtataaagagctttttcgatatcttcaagcgcacccttgtcataaggggtaatcaacaagacccgtgcttctgggactgtaattgcggcgatttggttaagtggtgtcattgcaccgtaatactcaacattcacgcggttgaccaagcttgcattcgcgcgaccagcacgaatttggcctaatgttctttgtaatgaagcttctgctttttccatgcttgcttttgcttcatctaaaattggatttgccatattattctcctccttcgatcgttgtcccgatgttggcaccttcaacaacttttttgatattgtttggttcgtttaagttgaagactaccaatgggatatcattgtccattgataaagtacttgcagttgaatccatcacttgcaagcctttgttgataatatctaaatgtgttaatgtgtcgaatttaacggcacttgaatcagtgttaggatcagcagagtaaacaccatcaacgttgttcttagccatcaagatcacatctgcatcaatttcagcagctcgtaatgcagccgttgtatctgttgagaagtaagggttccctgtcccaccagcaaaaatcacaacgcggcctttttctaaatgacgaacagccttccgacggatataaggttctgcgatttgacgcatttcaattgatgtttgcacacgcgttgggacaccaatgctctctaagttatcttgtaaagctaaagcattcatgaccgttgccatcatgcccatataatcggcttgcgcacgttccatgcccatttgttcaccagtcacaccacgccagatgttcccaccgccacagacaatggcaatttgaacccctaaatcgtgaactgatttgatttcgtttgcgactactttaacaatttcagggttaattccgaaaccttggtcgccagcaagtgcttcaccactcacttttaagacgatgcgtttgtattttgtatttgacatgtttgatatccctccgttgattactaggctcattttaccatatttaataagttatttgggtatgcgattctgaattatcgtaaaactgcaaaaaaaaggagcgcaaattgcgttccctttttgaagcaaaataagcttatttgatttggcccatgacttcatcaacaaagttattttcttttttctcgatcccttcaccaactgtgaaacgaacgaaacctttaacgctaccgttcttagatgcaacaaattgtgcaacagtttgatctgagtctttgatgaaagcttggtcgttcaagctgatttctgacaagaacttgttaacacggccttcaacgatcttaggaatgatgttttctggtttgccttcgttctttgtttcttcagttaatacttcacgttcgtgatccaatgtttcagcaggaacatcttcacgagaaacgtattgagggttaacagctgaaacgtgcattgcaacgtcatgagctgcttcatcgtcagcaccttctaaagtaactaatgaagcgatttggccaccattgtgtaggtatgcgccaaagtgatcgccatcatttttttcaactaattcgaaacgacggaagctgatcttttcgccgataacagcagttaagttgattactgagctagcaattgtgccttcgcccattggtaatgcttctgcagctgccatgtcagctggtttgtttttagcgattgtttcagcaatatctttcaataaagctttgaattgatcgtttgaagcaacgaagtcagtttctgagttcacttcaacgattgcagcagtgttaccatcgatggcgatgcctgctaaaccttcagcagcaatgcggtcgctcttcttagcagcctttgccatccctttttcacgtaaagcatcgattgcttgagcaacgtcgccgttactttctacaagggcttttttagcgtccatgatcccaacgccagttttcttacgtaattccattacttgagcagctttaatttcagccataattcatacctccgacaatttatattcaatataattggtttaaaaaaagctgtcccacaagtcaggcagtatttgcgaaacctctaagacagcttatttgaatctactatttagcgtcagtgttagtatcgttgtcgccttcaactgcttcaacgatttcttccattgagtctgctgatttgttttctgcagcaaatgtagcttcttcaacatcatcttcaccttgacggccttcgatgatagcatcagccattttagctgtgattaaacgaacagcgcggatagcgtcatcgtttgatgggataataacatcaatatcatcaggatctgagttagtatcaaccatagcaacgactgggatatttaatttttgtgcttccttgatagcaatgcgttctttacgaggatcaacaacgaacattacgtctgggatgcgaggcatatcttcgataccgcctaagaatttttcaagtttttcttgttgtttcttcaacaaggcaacttctttcttaggtaaacgatcgaatgtaccatcttcgtccattgctttgatttctttaagacgtttgatccgtttttggattgtgtcccagttagtcaaagtcccacctaaccaacggtggtttacaaagtattggcctgcacgtactgattcttcagcaattgcatcttgtgcttgtttcttagtaccaacgaataagaatacaccttcgttagcagcttcttctttaacgaagtcataagcatcgtcaaccatgcgaactgtcttttgcaagtcgatgatgtagataccatttctttcagtaaagataaatttcttcatttttgggttccaacgacgtgtttggtgaccgaagtgaacacccgcttctaataattgtttcattgacaatacagccatgtcaacagacctccatatggtttttttcgaccactggtttcacttttttagagaacttgtcgccaagcacctctctagaaatcaaccagtgtgaattattttttggtattgaaataccgtttaaaagtatactaaaaataacaaggcgcgtcaacaagaacttacatgccgcccaattgtttctgataacgggttgcatcttgtggttggtggctcactgaggtaacgccactcactgtttcaaccgctcgatagcccgcttttagcgcgacttgctgactcgccacgttttcgtgtgcagcaatgatactcaactggtcaagttccaattcactggccgcgtattgttcaatggcggctagtgcgcgatgcatgacacctcgtccgcggaaagcttcatctaaccaatagccaacttcacccgcacgattcaagtcgtcaatattgtggacatcaatcgtaccaactaactggtggtcatcccaaatcgttgccatccaaagttcctggtttgccatttgttgttgcgcatattttaaaaagccaagttcatcggccactgattcgatatcgcccacccatggtaaccaagtatcgagattgacgcgattttgatccactaactgaaataacgccggcgcatccgcttccgtcacaggttgtaaatgaatgtgttgatcgacaactaacttaggttgcatattggtctctccattctaaaattgagttcttgaaatgccatgttccattaaatattgttcttttttgcggcggggttgatgtttgaacgcatactctgctttaagcgccgccgatttatcactaaacgtttcaaaatataataaccgcactggtcggcgcaattttgtgtacttcgcacctttgccagcattgtgcgtggcaacgcgtttggtaacgtcggtcgtgaaccccccataaaaactatgatcggcgcagactaatacgtaaaaataataagccttctcagtcattgtcagccatgaataacttcgtgcgcatctctggtgtatagtggctgtcttggtcataaatcgtcagttccggaagcattcgtaagcccccttttttaccatctttgaccgcttcaattaacaccatattcgcttctttgcctgctttgggataaacaaaccggacgcgtttgggttccatgcgtgcggcgcgtagttcgtcacagatttctaagaaccgttcgggacggtggactaaataccctttaccattcatctttaacaggccactcatggtttgaaccacagtgcgtaagtccgttgcaatctcatgccgcgccagtgccagatgttgattgggatttttttgactattgggttcaaccttaaaatatggtggattacaggtcacaatatcgacgctgtccttatgaatcttagtgttaacgtctttcaaatccatattgagcattgtcacctggtcggttaagtcatttaattcaattgaccgttgtgccatgtcggccaaccgttcttgaagttcaacaccgataatttgaccatttgttttgggactcatgaataatccaaccgccccattgcctgcgcacaaatcgacaatcgtcccgcgttttggtaactgggaaaagtcggctaacaacaccgcatccatcgaataggaaaagacggatgggctttgaataatctgaatatctaagcgaaataattggtcaattcgctcatctgcttttaacatcgttctaccttcaacctcatttgtatttaggcatattataacaaagagtatcattatttggtataatgagcagatactagtcacgtttgaaaggaatctaaactatgtttttctcatttgcacgttttatcgtccgcattttagcctggttattgaatggcaatttgaaggtcgaaaataaagaagccctgcctgaagggacttatgttttagttggcccgcaccgaacttggtgggatccaatcttcttcgcacttgctgctagtccccgaaagttcacgttcatggccaaagaagaactctttaaaaacccaattctacgcttcatcttaacccacgcaaacgcatttcctgtgaaccgaacaaatcctggcccatcggcgattaaaacaccagtgaaagccctccgctcaaaagaactttcgttaatcatgttccccactggtagtcgctattcaagcgaacttaaaggcggcgcggtcgtaattgccaagatggcgcgggtcccactcgtaccagcagtctaccaagggccattaaaattctctgatgttttaaaacggaaaaagattacgattcgttttggtgaaccaatcccaatcgatccgaaattaaaactcaacgaagaaaacttagaagttgtcaatcatcaaatgcaagccgcatttgatcaaattgaccacgaaattaaccctgattttaaatatgaactacctgataaaaaataataacaaaaaactgctagatgatatcatctagcagtttttttagcgcgttaaattcttaaccgcattcgtcaccaatagataggccgtaactaatgccactgcaatccagccaaattgtgttggaatcgcttggaaatcaacggcttgtctgagcgatgtcaataccagaatacctccaattaacaaactgattaaactccccaagtaaacacgccaatttgcgcgatccttgaacggtgatgctggtgtccgtaatacataaaccactagcatctgcgtcaataaaccaacgacgaaccaactcgcttggaaagccccctgttgagctgatgtttgcaggccaaatccaaaccagagaatcgcaaacgttaagatatcaaccattgagctcaacggtcctagaataaacgcactcttcagtaagcctttagttgcccactgtgttggttggcgcaattgatcttcagcaacccgatcccaaggtaaccagagttgtgcgacatcatacagtaaattctggacaagaatttgcagtgacaacattggtaaaaatggtaaacagatgctggcaaccagcacgctcaaaacatttcctagattagaagctaacgtaatccgaatgtacttatacatattgataaagactctccgtccttcaagcaccccgtgttctaaaacgttcaaatctttttccagtaggattacatcgctagcatcctttgtgaggtctgcggcattatcaactgaaatcccgacatctgcttgtttcaaagctgtcgtatcattaatgccatcgcccatgaaaccgacgacttccccttgtgcttgtaataaacggattaaacgcgctttttgaagtggagccaatttggcaaataatgcttgctcggttaatagctcactgacttgtgcatccgttaacgtctctaacatctcaccagtggtcacagctagatcctgaatgcccactttttgggcaacttgctgcgtcgttaaagcactgtcacccgttaaaattttgaccgccacttgatgagcttgtagttgttgaattgccgagatagctgattgttttggtgggtccaaaaagccggcgaaaatcaaaccttgattaccaacgcggtcaattgatgccgtctctgctaactcatcttgataagcaaccgccagcatccgcatcccttgttgtgccaaacgatcatgcactgccactaggttctgcttttgcacttcagtcaacggctcaatctgatccgctaacctgacttgggaacacgttgctagcacttcttcaaaggccccttttggcactaattgattacctgcatggtttttgagccagaccgttagccgccgctcgaaattaaatggaatctcgcccaatttttaatatggaaagtcatcattggtttggtcttgttcatagtaatgaataatcgcttcatccagaaggttctgccagccggattgacccttggcgttcaaatatgctaatcgcaaaacttgcacatcccgctttcctaaaatatctgcatagtacatcaatttaatatgatcttccgtcaacgtccccgttttatccgtacataaaaccgacatcgccccgagattctgaatggcctttaactgctttacgatgacctgttgttgacttaaaacgacactgcctttcgccagattactattgacgatcatcggtaacatctccggtgtcaaaccaactgccactgccatcgcaaagaaaaacgactgttgccaatctcccttagtcacaccattaatcacaaatacaaagggcaccaaaacgagcatcatgcgaattaataaccaactgatgtgttttaaccctgcatcaaattgattcggtcgcgacttaggttcagtagtcacaattgcgctaaagcaagtcgcttgacccgtggcaatcactaacgcggtagcttgcccattgacaacggtgctacccatcagcaataaactcgccatatccgccgcattcgttacgtcagttgcttgcgctgttatgcgtttgctcacgggttttgattcacccgtcaaagaagattgattaatttgtaaatcatggctcgccagaatttttaaatcagcattcaccaaatcccccgtctgcagctgcacaatatccccaggtaccagactttgtgcggcaacttcagttggttgaccctcaattacaacccggctggtctttgccaacatcgcttgtaaagcaatgctcgcttgctcggacttgcgctcttgcacgaatcgaatgctactagacacaacaatcatgattaacataactatcgcgccatcaatatctcgactgagccaggagatgatcattaagacggctaatacgccgataaacggatcttgcacgctctgccaactagctcgcaataacgaacgctgttgccgcttttgaatcgtattttccccataggtttgtaaccgtgctgttcgttgctgccgtgataaccccttcttgtcagtttcgaaatgttctaaactcgcttttggcgttaattgattaatctgattgagtgtcattttaattgtcttagccatcgtaatccctctcattcgcagctgatccgcataaaaaaggcatcctcaaagaaaggatgcctcacaagaaaaacaagccattccaatcgttgagctttagcactatatgacgtagaactttgttcagctacattagaaaaagccttcagggcagtttctgttgactcaattggcatctctcgatgtttctgagtagcagcgtttgttcatataggagcctcacctaacggattagcgatatcaatatatttatatatctatcacaccaaatcgacttcaaaatacaattaaacagacttattgaagatattcatttaaaaattgcgcaactttattacgataggttgttggatctgtagccaaggcttcaccatgagctgcccccggaaccacccagagttgtttaggcgcatgcgccgctttgtaatttgtatacaccattttggttggtacaaatttatcttgatcgccatggatcatgaagattggcaatttcgagttagctaaactcttagcagtatcgccatcattaaagttatagccggcgcgaacccgtgccatccaattcgttgtgtaaaataacgggaatttcggcaatccaaagagatcgtttagttggtatgcgagttcgtcagcaatgctattatacccacaatcttcaatcaccgctttcacctgcttaggtaattcttcacccgcggtaaacatgacggtcgcgccacccatgctgaccccgaaaagggcaatttgactatcctgtccgttggtagcgacaattttttgggcccacttgacgtaatccaagcgatccgtccaaccatagccaatggcatcgccttccgattcacctgctgcacggtcatccggcgcgagaacgttgtagccaagatcgtgatacatgtgaatatagcgtgccatatcctcttttttacccatatagccgtgcgcaactaaaattgttttgttcgtaggttttgttgctggcacataaattgccgccaattttaaatcatctgtggcagattgttgatgccactttgattgtttaacattttttaaccaacgttgattgtcttgatagactttcgttggcttaccaccatttaaaaatgatttttgccccggtacaaatgcgtattgatacatatacatagtggcaccaaatagtgctaccaccactaagacaacaacgctaattaacgaccatttcagccagcgtcttttcttcatgtgctaaattcctcccgatttactccgcaataataatagtcgtgtctttttttgaaactgcttattcttcactgccaccattttggagttgatacatttcataataacgtcctttttgagccactaagctatcatgattaccccgttcgacaatctgcccttgatctaaaaccaagattaattcagcatcgcgaatcgtcgatagacggtgcgcgatggcaatacttgtacgtccttgacgtaaccgagcgagaccagtttgaatcatcgattccgtttccgtatcgatattagccgtcgcttcgtccaagaccaagattttaggatttgtaaccaatgttcgcgcaaacgaaattaattggcgttgtccacttgaaaattgggcgccaccttcaattacacgagcatgatattgaccaggtaattgttcgataaagtcatcagcttgcacgaattcagccgctgcgcgaatttgggcatctgtaatctcttgattaaataatcgaatatttgatgcgacatcaccataaaacatgaatgcatcttgtagaacaagccccatcttgcggcgcagttctgctgtctgaaaactccgaatatcatgtccgtcgattagaatctgaccttcataaaattcatagaaccgcatcatgacattaataattgaacttttcccagaaccggtatgcccaactaaggcgacagtttgtccaggttcaacaacaaatgagatgtcatgcaaaatttcatttttcccatcgtatgaaaacgaaacatgcttgaattcgacgcgaccctcagtaatttcatttgcagcatcggcattttgagctggcgcatattcttcttgatcgagaattctgaaaattcggcgaccagcgaccattccatcttgtaatgatgataaagaatccatcatattggtcatcggattaaagaagttcccaacataggttgtgaacgcataaaccaaacccgccgtgacaaagctatgcagggctgagacaccaaacaagctcaagacaacgaccaatgccagtgtatagagtaaattcacaattggtgcgagcaacaacgagttcgttcgaatcatcgcttcgcgcgtttttaaatagtccgcgttaacttgttcgaattcgtcggtcaaccgtttttcctggcggaattgttggataatcgtaatcccttcgattgattcgttgagtttcgtattcaactgactcaatttttcacgcatatgccggtaaacccgcgcactgtaactactgtaataccagataacaattaacaatattggtagaaacgctgccgttgcaagggcaatttttggtgaaattaaccacatcgcaatgaacgctgaaatgattgaaaatgaaccgactaacaaggataagaaaacattccaataatcaatcaaggtcatcgtatcattcgtgactcgtgagacaattgaacctgccggcgtctgatcgaaataacgcatcccgagttgatggagcttctggaataaatcgcgccggacatcttccatcgcgcgttccgaacccattccaaaaaggaaagattggaaaaattgtgtaatggctttgagaatcacgcctaaaccgtacaacgccgcaacccccattaaaacttgggtggtcgcactctgattggttaagtaacgatccataaagacttgtagtaatcgtggtaataaaatattgatggtcgctaaacctgcggcggccacaattgcgccgataaattggcgtttatagcgtttcgtataaccaaagaggcgtttcatgatgtgcaattgctctttcaatggaactttcttggaccattctgattgatattgcttggccatcttatgcacctcctaaggcttgacttaattgttgcttcaaccacatctctgcgtaccaaccatctgcggcaaggagtgcttcgtgtgtcccacgttcggtgatttgaccgtcatccatgacaatgatttcatcggcgtgcatcacactactcaagcgattagcagtgataatggtggtttgatcagcccgcatcgttttcaaattcattaaaatcgcttcttcagtctttgcatcaacggctgatagcgaatcatctaagatcagaatttctggatcagtcataatcgctcgcgcaatcgcaattcgttgtttttgcccaccagataacgacacaccgcgttcaccaacgaccgtttcataaccttggacaaacgttaaaatatcatcatgcaccgcactcgaaatcgcggcattttcaaccgccgcttgatttcggtcaaaatcagcaaaccgaatattgtcgcggacatccgttgaaaataagaaattatcttgtggcacatagccgatactatcaagtaacgcatccagcgaataatcccggatatcgtgaccatcaatttgaatctcgccttgatactgatcatattcacgcaataataatttaatcagtgtggttttacccgaaccaacttttccgacaatgcccaacgttttaccttgtggcagagtgaacgccacctgtttgagcgttggttgtttgtcgccagggtacgtaaatttttgaacagcataatgaatatcgccagttgctagtgtttgaatcgcatccggtgcttcgacaatggtgctggtttctttcaaaagttgatcaacccgatcataactcgcattgccccgttccaagacgttgaacaagcgcccaatcgcaaacattggccaaacaagcgccgcgatataactaatgaacgaaatcaattgaccaatcgaaatgctgtgattcataaccaacgtcccgccataaatgattgttacaatgtacgttaacccgataatcaaactgatggcgggatcaaataaaccatcaatcatattcacacgtttattaatcgcaattgtcttcgtgacaatctcgttgaaatctttaatatcagcttcttcttggccaaacgtttttaagactttaatcccagagacactctcttgggttttatcattcaaccgtgaaaaagccgcctgtgattgcccaaacgctgtgtgtaaatgtgcacctaaccgtcgtgacgcaacggccaacaagggcattggaatcaaggccatcaacgttaagcgccagtcaacgaaaatcaccatcgcaataatcgttgtcccaccagtgatgattgaatcggcaaaggttaaaataccggcaccagccacttgttgaatcgcggttaaatcattcgtggcatgtgccatcaagtcacctgtccgatgtttttggaagaaggtcgtgtccatcttcatgaaatgccagaacaatcgactccgcaatgtccgttccagtttagccgcgccaccccaaatccgggtccgccaaccatagcgaaaaatatattgtaaaatcgctgcgcttaacaagacgccgagccacatgattaatttttgggccgttaattgtttggcgtccattaaatcaaccagggtcccaatcacttttggtggcacaatttggacaatcgccacgaggactaaaaagatgacgccccataaatagcggcggtattcttgtttaaaataccaccctagttttttaaaaattcccatgttgtgctcctatcctctaaaattcgataagtcctattataacaatcttaattaagccggacaatcatttgtatttccgttcttattatgataaaaaaagagcttctaacaaacgacttgttcgttagaaacccttttaaaaccgacttgactgttttattttttgttgctacgtttttgttgtgctttcattgagctcatcatctgatttaatttcttttcagatggtttttgacccatttgcatcatcatagcctttaacatttcttcgttaattggtggattgtcttggaaatacttcttcatgtaagcacgtgcgccaaagaaaccagcgactgcgcctaataaagccccaatgacaaataataaaatgcctaatcccatatcttatgcaccccttcctaattcagttcacttaaatagtttacacataattaacctaaaaagaaagcggaattctaagattaatcgtcacgcaagcctttttcccgttggatatccttcactttttcaggagtgacttccttaccttctttgtcatacacttgtagcatctcaacttgtgagcggaaactttcgcggaagtcctttaaataggcatcgcgcagtgtttgacgttctgctgtttcagcttcagttagtccttcagcttttgctttgtgtgctaattcattaattcggtctaatcgtttttgatccattgccatcttgttgccctccaattcaaactatttgtctattttggactaaaatccgtaaaatgtcaaaaaacacgaacgcttgtttgaaatcccgctataggtatgctaacatatagctattagaacaaatgaggtgctcttatgacgagaacagaatccaaacaattagaggtcttgcgttttatccatgaccgcgttcaagataaaggttatccgccaacggttcgtgaaatttgcgaagccgttaatttatcctctacttctaccgttcatggccatttagcacgccttgagaaaaaaggctttttacaaaaagatccgactaaaccacgtgccattgaattaacagcagctggtttgacagcaattggtgcatcacagaagaagattccggttctcggtgttgttacagctggggcgcccattttagcggttgaagaagcgaccgattatttcccgattccaccaagtctacaaactgaacaagatttgttcatgttgacgattcgcggcgaaagtatgattagtgccggaattttagacggcgatgaagtgatcgttcgtaaacaagcgactgccgataacggtgacatcgtgattgcaatgactgctgaagatgaagcaacttgcaaacgattcttcaaggaacctgatcattatcggctacaaccagaaaacgatacatttgaacccattattttgaatgaagttagcatcttaggtaaggtcgttggcctataccgcgacagaatgtagctatcaaaaaaggattcgccgttatggcgaatccttttttagcatgttccttcagccaggtccttacgtttagcgactgactgacgttacattttttcttaacgtgctttctgatgcaatttcttccgtctagccacgtctcgcaaacaacccgattgcatcggttattcaccaacctaagttaatgctcagactctcccagcttagaaagacatccattaataatccattaatttgaagatatcgtagtctttaattttttcgcgaccgtttaaatcgtttagttcgattaaaaaggctgttccgacaacaatcccacctaattcttcaaccattttgatggttgcggcgattgtgccgcctgttgcgagtaaatcatctgtgaccaacactttttgaccgggtttgaccgcgtctttgtgcatgtataatgttgattcgccgtattccaagccgtaacttgctgagacggtttcgcgtggtaacttcccttttttacgggctggtgcaaaaccaacgcctaatttgtaagctactgggcagccgacgatgaatccgcgggcttcagggccaacgatcatttcgacccctttactctttgcgtattcgacgatcttgtcggttgctgctgcatatgcttcaccatcagacatcaaaggtgagatgtcacggaatgtgacaccttcttcagggaagttgggcacacttgcaacgtaatctttaaagttgattgccattttaaattcgctccttaactctttcaacagtttgctactgattgaatcctgccagccagtctttcatctccgcgaaggttgagtaaacaagctgcttttccatgtcaattttagctaatcgttgttgataactcggtgcactttctaatgcgtgcttttccggttgttccgcggccgaaatgagaccacattctattttaacaaatcctaagtcaaaaaacacctgcaacataaaaattaatagcggcaatttaatttttagataagtcgctaattcccctaaccgtgctttttcaattcctggatgttgacgtaggtaaaccaagaaagtcgcaaactgtttcttatcaggaataccatcaagatatgccgaatacttactatagaagataaagctgattttagtggcctgttgttggcgataaaaggcttcaaattcatctaaatcagttggttcatcaaccacaatcaattctgcttgctgtgcgacatcggctgctaagatggcttggctgccggctgggatataactttgtagctgtgccagatgcttctcattgaaaaagacataggtgccactagctttaaacaactgttgcgtcaaccgattactccgttgatcgattaacacttgcccactcgtttgtaaatctttcagcatcaattgcaacgtcgtattgccgcgccaagtattctcacttagttgaccaactaatttcaactgttccaccgcttgtaaatcgtcgtacaacgcaccacggttaaatgctaagactgctaactgcgcttcttgatcaaccgccgtaaatttcaaatgcttctgatccgcaccgatctgcttcacattggtgacggatggcaccgtcatttcaatcaaaggttctgggttatccgtgccataaggagctaattgactgatggcttgataaacatcgggcgtcacatcagctaatgcgagttgtaaatcaaccgccaatgtgggtttcgttgttaaatcaatctgattatcagcggcataagtattcatcgccgtttgtaaagcagccaattgatcgactggcatcgttaagccaacagccatatgatgcccaccaaagtgcgtcaacaatgtgcgttgggcatcaagcgctttaaagagatgatatgcttcaacacttcgtcccgatcccttggcttggccagttgctagatcaattgctagcactaaagttggcttaccggtttgttcaacgatatgactcgccacaatccccagcacaccttcatgccagccttcatgtgccaacactaaggtcgcactagcttggttctcaggtgtttgtgccatttcgctagctagcgcagtaatttcttgcacaagaccctggcgctttttattttgttgttccacaaattgggcctgttccaccgcttgttcttcatcgaaagtcgttaatagattaacacctaagttggcatcacctaagcgaccaatcgcattcaaacgtggcccaatcccaaatccaatcgatgtggcgtcaagcgtttcttgttcaatacccgctgactggcaaagagccactaaaccgggacgactggtattttgtaattgttgtaagcctaagctaactaaaacgcgattttcatcagtcagtgacactaaatcacagaccgtcccaatcgccactaggtccaaactctcgtaagggatttcttccaataatgccgtagcgactttaaatgccaccccaaccccacataaatcactaaagggatactgtccctctggatgacgggggtgaatgattgctgtcgcatttggcaatgtacttggtagttcatggtgatctgtgaccactacatcgacaccgtgttcttgcgcgtaggagattggctctaagccactcaccccgttatcaacggtcacaatcaactgggtcccattttcaacgagttgcttatagacatctaaattgggcccgtagccatctttaaaccggttgggcacatatacttccacatcggcgcctaaactttcgagcgtctcttgcatcaaagcggtacttgtaatcccatcggcatcgtaatcgccgtagactgtaattttttcgccgcccatcacagccgcttggattcgatcgactgccgtttgcatatcatacaaagcgtatggatcatgtaattgaccgacattcggatgcataaacgcactgattgcctcaggtgttttgattcctcgttgccacaacaattgggctgcggctttcgggagtgcttcaactgccattattgcttgtaagtcttggtcagttggtgttgcttttaattgccattcatattgtgcttccacattaatccctcgctacttccaaatcattaacttacccattatagcaaagattattatatttcgtttaataatccaatcaatgcttttgtttatcagtccaaatgatatactgttaattgatacacaaggttattacatagggggaaacaaccatgacagttttagtattaggtggcgccggctacatcggctcgcacaccgttgatcaattaattcaacgcggcacggatgtcgccgttgtcgacagtctcgtcactggccatcaagccgccattaattcacaagcgcgcttttactcgtagaagttttctacaaaggtaatcgaattgcctcccataaacgactaaccggtaaattcgggcaattttcaaccaatcacgatcatttgccagcagaacataaactgttcgtcgatcatacacctgagaacgcattagcttgggcggaagaggttggcatcaatacgcttgccgtaatgcgatatctacttaaatcggcggcaagtgaaaaacaaggtctaagtgcagcttttcgattcaaaggcttagctagaaaatacgcagctattgaaatcgaagccgcgtgtacgaccgtgatgaaaattgcgaccgcaccgacggtgtccgtagttgaacgggttatgaaaagtcaaaagattccagcaccaaagacgattaacgaacccgactacggttttactcgtggtgcagcatactttggaggaaatgactaatggtaaatgacgaaactcaacggaagttacggcagatgaagcttacctctatggcaaatgccttggaagcacaggaaagcaacacagaatatcgatcaatgaactttgatgatcggttcaagttactcgttgatgcggcttacgcaagccttcagtcaaataggctgaatcgactgatcaagagtgcaaattttcggacgaatgagccatgtatagctgatatcaattacttgccggatcgtaagttggatcggaacttgattcaacgccttgcgactggcacgtatattcaagagcaccataacgtcatcttaatgggtgcttcaggtaacgggaaaacatggttggcgacagctttggggattgaggcttgccatcagtttcataaagtaaaatatgtgcgtcttcccgaactgattgatgatttgattgtagcgaagcatgaggcaaacggtgactttcataagattattgaacggtacaagaaagttgaactcttgatcatcgatgagtggcttttgacgccgatcaacgatgaacaagctcagactattcttgagttgatcgaatatcgaagtcagcgtggttcaacaatcttttgtactcaattcgcgccggaaggctggcatagtaagctgggaaatccacagattgcggatgcgatccttgaccgaatcgtccacgattcttacaagctccttatccaaggcgacaaatcgatgcgcgagcggtatggaatcggaggcgaatttgcatgatttcagtagaactggaacaacgattggcgctgttctatgcacatacagacgcaatggaagactgggaaaacgtacttggcgatgcgctggtggatattatctgggaaaatgacgataaattgaccgatgacgagcttttcgaatatggaaaggaagtcatcgtgaaatacctgggcaagtgccgaggagacaagctcccgtaaaactgaaaatggcatcgctgaaaacgctcagcgatgccatttttgaaattcttggtcaattctttcgccgagcggtgtcaattttagcaccgaatggggtaaaaaagatcgccgagttgggcaattcgcttcgccgccttcaactaatcgatgtggaagaccataggtctttaaaaggcgtttgagaaaatgataggccgagttaaagtcacgcttcttgcgcagttgaaaatcaagcgtaagaccttgatcatcaatggcacagtagaggtaattccattgacctttgatcttgatataggtctcatccatacgccaacttttggaagtgcgccgatggcgcttacgccatagagcccgcataatcggtgagtaatgttgtacccaacgcatgagggttgtgtgatgcacgaaaataccacggtcgcgcatcatttcaactagatctcgataactgatgttgtaacgcaagtagtagcctacggcaaaagtaatcaccgattgattgaattgccgtcatttaaaatgatcagtcatctgaaaacctccagtttaaattcatgatacaggatgcactctccctgagtaaactttgcaccagaaccaagcggctgaggcgaatgacgtttttgatctggctaacgccgaggagcgggataaatcggaagacaacgacgagtggattgaggacgagcagtatgcttatggcgatgattgggatggggtctgacctggacgggatgacgacgacttgacgacccgcatattcttcactttgtagatgaaacgttagcacatgcagatcacgttttacgcggtcaacgttatggtcgttgattcctagaaatcgcaatacaccaagattatctttggacaaggtagaaattggtttatcactgacgggatctaagctaattctagagtgcataaagatacccggcacaccccaccacgttggtttaagcgaagggggcgtgccgggcattatttttagattccgttggtgataatccagttattgtttggcttggataggatcaaggtgtattgcgatatttggctcatgtcattgtcagtgtcgagatacttcacagataacgtgacagtcaaaccgcgcttagtctgcttaaagactggatctagaagttccacgaacttaaggttgcgttcgattggctgcgtgccgtccttgacgtaatacttgagttcgttgcgatcactttgcgggtacaaagcgaagaacgttttgaggaacttggttacgtcgtctacggtgctgctggctaccgtgttatcagactgggtatctgggagcttgatccgggccgtcgctggttcagccgcgatggttgggttcttagtgaccaccatatcgccgttgtcattttgcatgacgttgatggtgtaggtactggtcacagacttcttgtctttacctttggtgagatcttgtttcaccgtaaatagtacgcggaatgtgtctttggccgtcttgctcacgtcccagaccttgacctcactaactgtggcggttgtaggaatatcgctccgcacagtatctgcgttaagcgattgcagttgctccacgagatacggctgtaaggatttctgccgctggtcgagggtttcgtggcttggctgccacgagtagtagagcttggcgaagtcggtagtgaaggtcgccaaggcgtgtgtatcaattaccttggtcttgatcacttggacttcatgcaccgtgtgggtgtcaatggaggtcatgttcttgtagacgccgaagctggtgctaccgatcaacaccgcccaacaaagcagcgtgaccggacggcgcaagccgcggtgcttaatttggagtgaatttggcgcggctggcttctttttgaaccagcctttcttttgggttttgtctttactcaaggttcgttcaccttgtcctttctagtttcatagcagcggtaaaagtcatcgtaaatatcaagaaaacgcacgaacaagcgttgcagggagatgcgcttgtagctctcatagtcggtttcgatatactgaccgagctcacggtcgttgttgaagtattcttcagccaagtagcgttcgcggtcgaggatatacttgcgatcttctggggcaaacaccttgccaactagccagtgctcaaccgcaacttcatgggccacagccagtcggcattcgcggcggtggccggactccatttctggcatacggtccacgaagcggtcgatcacgttgcacaggtcgtcggtgttgggctttctttgtttgaagaacttgattcgttcccattcgctggaagcgaagtcgagttccttgtttcttagcgcgcgattgtcaccaaatttgagatcgacgtgagccttttgcagcgcgtcgtcataggtgttggtgatgagatccatccagtcaaaatagctgataccgttttgatccatcgtcttcacctacttcttcacacgcccggcgccgatcaggtgggattgccaatagtttgagttcaagtcggcatagcccagcgggtcgcccgcattatacattttcatgccgtcaacgtagatcccaacgtgggtcacgtaatctgcggtgtcataggtggaatggaagaacacgaggtcgccgggtttggcgcctttgatgttcaggtgtgctgtggcgtcgtattgtgcttgtgcggtgcgggggagtttgatcccggctttgccgtaacaccaactagttaatccagaacagtcgaagcccgttgctggcgttgaaccgccgaacacataacgagtgccttggtacttgagcgcttcgtccatgatggcttgcaccgtgttgtcgtcgaatttagcgccaccagtgacaaggtattgcgagatgaccgacacgtagtacatgttcccataggcatagcgccaaccgtccttggcaaccgcgttggtgtaggtgaatttcttaccaccagacttttctttagcaaaagatgttgccagctcaagcgtgtactttttcccgtgcctagcaacgtagtcaataaagccgccaccatagttgtagctttgaatcgcggtgtttagatccacgcccgcagctttcatgctttttaacagcgaagcgaaatatttcacgccttgcttgatggatgattcggtatctagcgtattgaccggtaggcccatcgattcactagcttgcatcacgtcgccacccttgccacctgattcaacctgcatgatggcaagaattaccatcacttggtccgaaataccgaactccttgcaatacttttcgaccatcagcttgtgcttgtagacttcagcggataagttcatcgcgtcggctgtgaccgcagaggcaggctgatcttcgtcatcatcagaggcgatgactgcaaaaaacagaccgcccatcaacagtattgggagtgcggcgagagctaaccagtgccagagcttcatcgcttcttatgccccttagccttttgaatccgctgcggctttgggtttcgtggcttggttgggtttcgtggcttggctggtttttcggaaacgagggtcaggagtttcttggttttattcattggcggagtaggttcttggtgcggtttgatggtgggttctgcttgcggtttcgtgactggacgtggaggccgagttgaagttggcttcgtggcagcacgcttaggttgtccactggtatcagtttgttcaggctttggtttggtaggtgtggcagttgttggcttacgagttggttcaaccggcggcttggtagccgttggttttggcttttcaggatcagctttaggcttgatcgccagcttgcgttcttgcatttgcttacgccgctgctcaagctgtttgtcacgttcctgctgattagcctcacgccgacccttgaagctatcttttgcagtttcggcggcctccttggtcagttgcttaccacgatgcagaccatataaaacgttggttggtgcgtccttcacctgatcaaggccgcgtttagtcttgtccttgagcttgttgccgacatcagatacatcggcaaatttctcacccagacgttggctgcgtggcttcttggtttgttgtggcttggcagcgtccgcagtttgctcgcgttgcgtaccagcggggagctgtggtgtttgcggcattccgcgcctcttgccatagccccgcgacaagaagcgtccggccattgcgccacccatggcactaccgacgaactgtcgtagcatgcggttcccacgacgcgagaagcgttgtgcgccttgctgggcgtcagagctgtggagatgcatcatgcccattaggtcgccgagcttcatccagataccggcgaagatggtaacttgcaggaaggccacgaggaagaatggcgaggtagccgacaacccatagaccattgccgatagcgagaaagccatcgtaatcaccagcgtcacgccaactcgtgtcatgatggtgttaaaaagcttcataatgttctgcttcatcaatccgttaaatgacggcagcatagcgagtaagaacgacaccggtaagaacgtcgcgtagatgatgaagaggatctggctgaacagcatcattgccgtcaggaagaagacaaacaaggtgatcgcaatgttgaacaggacaacaaaggtcgtggtaccaaggcgattgatcgtcatagttggcgagagattctcgttatcgttgtcttcaatttcagccttgaccacgtcagtacgggttttgcctttgtcgccaaacgggtcggttttcattaacgtgtttacgcggtctttgccaacggtatcagcgtcactgtcgccaaactgtaaaagcgtccacggctgcttcacctgaatttcaaacagggtgtcacggatcgcatcgacacctgatttatctgttgcggtatcagtgcccataatcatcttggagccagtgttgagcgcgctggcgctgatgtcgctactgaactcgttgattttgctgacgtaatctggggcataagcgataaagctggctgacgtgatgaagatcaccacgaagttgacgatcgccgaaatggctttcgaggtttcacgcttgatgatgccagtgtaggccacgtagataccgacgacgagtgtgatcatcaggagcaagcccgggtaaaagccgtcagtggtgaagccatcttttgacaccccagccaagagctgcatgttcttcccaatcgcgtcagacgtatctttgatgaagtccagcgagtaggcttgctgaatcaggtagcccgcagcgtttgagaggtagacagaaagtgtccacaagaagttggtgatagcgtacaggccatagctaacagacttgccgataccatcgccccaattccaaggcaaccagtcccaagacgtatcgacgaagtagtcgagctgatagtgtgacaacgggtacttggaatactcgttagagccaccagactgatcgtctaccaaccccgctgcgtgtaccggctgaccaccagcaagcaccagcatcaacataaatgccgcgacaacaccgaggaacagcagaagccgccgacggttagctttcgtcatcagcgatcacctccacgggtttcggtggccgagtgtcaaaggcgtggtgtaggtgttcaaagatatagtcaaagtgcagcacgccgacgtgcccccagatgtcttggaacaagcactccccattatctagtgaccggagccggttttgattaccttcgtcttcggcgtcgaggccaaagaagttcaaggtgttcttgatttccgtgatgtcggtactgcggaaggcgaacttctgggcgatgttgttcttcatcttttcatcgagcaagtcgtctgcattttgagtgacgaggtagaccccggcattcatggagcggccttcacgaattaacttcatcgacaaggctttgccttgcgcaacattgaggaacgcccaggcttcgtccaagtccacgattttgaactgggcgcggttttggtgaatgaagtcgatcgcgaacgtgctgataatcatgagcatggcgacggacagcatttcagcagtgatatattcttcctgcgtcttgtcggcgtctggaagcaccaagtctgcgatctgcacgatgttgatcttgcggtcaagggcgattgtccgccgcgccgtcccgtcagagaacagcaatgccgcaaagtcatagtccgtgaaggattcgatatgatcggcaatgttacgtgcgatcggcgtgtcttcgcggcgaagttcatcaatgactttcaacagtcccggttcaggagcttgcgttaccgcgcgaatcgctttgcgcagcgtcggaaagcggtcggcgtcacggcttgagatccccgtgaggaaggtcagggtatcgacggccagcgattctgaatctttcaagttggacaagatgatataaggatcaagcagcccacggttttgttcttcactggtcaggttgacgatgttgatttgatcttccataaagtcgaggttctctgcccagccagtacgttccgacttcggatcaagaatcagtgcctgtgcgccgtaaagtacggcgtagtatacaagcaagttgttggagaaggactttccaccacccaagctaccaaggaaggcggcggataaggcgttggtgacggtgcctttgatgccttgcgcggcaatgtctggttgcaagtagacgttgcgtccagtgtctacgttatatccgatgtagataccttctttttcaccgagcgattgcgtcgcaccaaagcctagtgaggcgatgaaatcgctggtcacatactggatatagtcgttgatatagcgctttgaagcggggataaactcgctgtgaagccccagcatgtcgccgaatggccgcacgagcttgatgttgaggctgtcgtagaagtcgagtagctgatcagcgcggcgcttcatttcgtcttcactccgcccagctacgcgaatgacatagctgatcttgtacatggcgtccttagtctgatcaagattgctttcaagctcatcgactgaatccaacgcgtcgctgaccccacgcgtcatttcattgccggattgataagcgtgttcgtcgaggtctttcaactccttctttttgttacgcaccttggtcagcgcctttttgttggtcacaatctcaacgttcaggctggtgtcgattggaaaatcgaactggctttgttggaaataaaagatttcactgccgggaaactccaattcaccaacaatgtcggaaagcgtcaggtacgtcacgtaactgctatccagcccgtgggtgatcttgatcgagcgttggtgctgctcaatcagtgagcgggttggcttgatcaggtcatagcccttgataatcgtgtcgcgcttggacttcttgcggggcaagtgatagtcatagtcatcgtagtcttgacccgtcatgccgtataagtgctccagcaagtagccgaagtcgttcttatcgagcggacgaactttgaaccggcgaccaatcttttcggcgagaaactttgcggacttggcgtagcgttctacctccgcgttgttcatggtgaagaaatcaccagcgaacgttgtgttgaactcggagaagaagtcccgaatgcctaaagacatatccttgaagatagacttggcggtaacctctgcgtcgttcagcaacagcttaaagccgatgaagaagcggtagtccacttggttgtcaccgacattttcagtcaatgcttcggcttggccgtcgatgtgctggaaggcgatgtctttcagcgaccccttgaccaacttcttcgagcggtcgagagtgtcccacacactggcttcggtggcgagctgcaataaatggagcttgccgtcgcgattctgcgagatcaactgacgaaagttctcatggacttgttgtttctgttcagggcttagaaacgagtagttgtacggaatcaattcaaaataggcaaagcactcgttgtctgtgttccagaccaaattgtcctcaatatatttaattggaaatttcattgtggtacctccaaacgtaggtcacagcagcaatttgtttctctttctgcgacttcacaggtttaccagcataggtgagcttcggggtaatggcgtagttgatcaccgaccgcaagaatcccattggcttcttgttgtcgaaggtcttctggctcatgaaccacgttagcccagccggaatgccgacgtacttgagaaacacgccgtcaatgaatgatagtggtggcaagtcgcccagaagcatgactgcaaataagctgacgatgaaccacgtcatttgcgtaaaagtaattgggaacggtagttgcaggtcattgatggcatacagcaccttttccactgaccagatgctggtgtaggatctgactttcttcatgtgatctcctttcgtagtgagataaaaaggctggcgccttttgcagcgccagcccagagagttagtctaataattggtagatgccgtaaggtgtttcaacgaaacctccttcaatttcgaggtcacgtccgaccttggcatagtcgatatagttttcgacttgtggcggaatgtcgccgaaccagccttcgtcagccagttcttcggccaactccgccatgttcgcgacgtgatagcaggcgatgtcgtccttgtgcgccgcgagttcaatcacgttgtcgtaccattcgccgataagctctttgatggcagggtaaatctcggtgcctttcaatgcttcaacggctgcggcagcttcattgatctcaccaatcgttgaatactcactaaagacaatggggccttcgtagtcctgaaccatgtattcttcgtactggtcgttcagtcctagcttttcagcgagttcttcgttgttgattggcggcgtgaaccatgcgccgacaatctcgccctcgttatacttgccaagattggcaataaagactttgatgtcgtccataggctaagcccccatgacgcggttgaatagattcagcagtacgtctttgaccccggcggtgttgaacaccaacccgacggcaatgatcgcaatgactaagaagccgatcagcttggaaaactcgcgcttgaagccgaggtagaccccgataatggcaatcgccatcagcaccaagctctgggcgttggaggtgaaccagttaaacaagttttgtccgaaattcataataatcatcctttgatttttagttttgtgaccagggctcctttcaaaattgctgctgttttggcgcggtcagcagcgaccggatcatgggtaacggatcagaaaagttcagtttgagttgcgtggtggtgcttgatgcgatcaagggcacgccaccagtattcttcactaatttcataaccgatgaaatgacggtcagtgtccattgcggcaatcgcagtggtaccagaccccatgcagttatccagcacgatctcgccgggttgagtgtaagtcttgatgaggtaggcaaaaagatcgacaggcttttgcgtcgggtgccagccggtgcgatcagacttgtagttgagcacgtcagacggatagttcgtccattcttgtgtgtagctatcgggagcgttccacgggtgcagctgatttgagttctcgtatttacgtgagttgacggttttgttataggggagcagtgcttgggggaagtagttcatgcctttggtatcgggggagttaccaaagttggccgtacccgacttggagaagacgagaatctcctcgaaacgggataaggggcggttcttggcattgacgaagttggtgacagtattcttgatccaaacccacttgtagcgatacaaggccgggtttgattgcactaagtccgcagagaaccgttcagttgcggttagcacaatcgcgccttggggtttgatgagccgttcgtattgacccccagaggtgggaaaacggaatcaccttgtcccaagcgtttgctgtggtaccatacggcaagtcgcacaggatcatgtcgatagaggctgtcggtaagtccgccataccttccagacaatcgcgattgtagatgacgtctagttcgattgcgttgatactcctttagttgaatttgtggccatcgctcctttatgaattgcgattgttttggcgcggtcaatagcgaccaagtttgttaatcgaaaaataggtcttccactggtgcagcgaagaccggccagcctgattcttcggctgtttgataaagcagtcggcgcagttcaccgtagttcaaagcgcgaccatcacggccaatcaatgccgccgggtgttcttgttgctggtgccgccaagcaatgtagtcttgtgccgtgaagcccaaactgttcatgtcgcaaatgcgccggtacttcttgtgttcgaccacgccgactagtgcagccttgtagacgtatacgttcagtacacagtctgtgaatgccttgccgcgcagcgggtgggaagcaagcacatcattgaccaaacatgtcacctcctagctcctcgctaccaacagtctgttgctcaattagcttgaggtgtttatcggtcagttcggcgtccttgatcatgagctgtaagtcagtggtgccgaagtagttgtcgatttccttgatgaccttgagtgtgggcatgacttgcttttggagccatgccttggttttgttcaggtcaaagggttgtgggtcagtagtcaggcggatcggttggcgacctttgccaaggaagtatgcccaacgttcgttgagcggccacttgagacggcttttgtccgggacttcatcaacaaagcgcatgtagcgggtgataataccgaaggcgaccttttcggcgtcacgggttatcagcatgttctcaatcgccttgattgcgcgctcgtttttcaaacgaatttcaaaccggttgatgatcggggtgtcggcaatcgagatactacgtttggcagcttgttcggcagccttttcgtagatgcagaaatacacgtcacttttcatcgtgccgacgtaaagcgtattgcctcggccagcttcgtcgagatccacgagcttgcctgattgcagcccttggaacgatcgcatgacggaaatgcattcattgttcagacacttatcgaccagctccggaatgcttagcaggccaaccatgtcgttaatcgcaatatcgacccgcttgaagatgccgccagcttcatcaacccgaagaaagtagtcgtaccagttctcaccatgacttagcagaatgccttcaaactcgcggcaaccttggcctttcatctcaaccaatgtgccgaggttggagccaactggtgccaccatgacctgaatgttagagaagatatacatggccgaatagccgtagaagccatgttcctcaaatatcaggtgttctggggtcagaccgagaatattggtgatcacagtcttggcgtcatgtgtcgggaaccgcacgcgcatgtagtcaaacatcagcgtcagttctggttcatcgttccagttcttgagtagccggtcgatttccatttgcagcgatgagctagggttcgtctttccgttttccacttggacgtaatgcatccgtgtaacacctaagcgccgggcgacttgagcttgggtcagcttgagttgcttgcgtttggttttagttttttcatgccatgagcacatggcaacgctcctttcaaaaaatgatggattgggggtgccatccatcattttgccttcttctattgaaacgccgtcatatcaacctttctaccccgtgctcaggcaaagacgttgtatttaatacccccctgttagagtactgggggtaagcggtcggcgccagccgaccgctgccactcacgcctgcggctttcgcgctgcacgccgcgcgtggcggcagggtgcagccttgctgaacagattggttagtcatagtcctgctcctttcaaaggctttgtcttgacgacggcgtgtagccgattagtaatgatgcgcccagctatgataggtgagctgcatgccagtttgcgtcatgttagctgtgaaccagaagtagacgggcttgcccgaaatagtgcgatcaccgacgagctcgagccagtgatcgccgtcttcgtaaggctcaatgtaatcgcacatttccagcagggcgtcttctgcgtcctctggggttccagctataatcgtgtcagcgtagtcttcctgaaaacgactttgattgttaataattggtattctcatgggttctcctttcgtacttgtgatttcacgtttcaagcatcgttatatggtataatgatgcttgaaacgtgaggcgaacttaatgtcagatttaattgaatccttcttgaagcaaaataacgggcaggtaacgactgcggatgctagaaaacttggaattgatccacatctgcttattgatcttgcaaaccttggtaagctagaacgagtagggcgtggggtgtatattgacccggcgatatttgaagatgacatgtatatccttcagtatcgttttaacaaaggtatctactataaagacactgcgctctttttgcatcatatgatcgacaggacaccggatcgttaccaaatgaattttcctcgcggctataatgcaagttcactcggcgagtttcctgtgcgggtctatcgtcaaaatgtaaagtggcatgagctaggcgttgaggaagtgctgtctccgggtcagcacaaggtacgggtctacaatattgagcgaaccctctgtgatattttacgagcgcgtgattcatcagattcggaaactattcgtcaagcaatgattagctattcgcagctaaagcaaaaagatattgggcggctggtacgctatgcagatttgttcaaagttagagaaaaaatcaacaactacatggaggtactactgtgaaactaggtttttcaaatgggcaacagttcaaagccaaggtgcgtaaccttgccaaggaaaagcagattgatccccaaatattgatgcaagaggtggcgttagacgagattgtagatcgtatttctcgttcgccttaccgggataacttgattctcaaaggcgggtttctaatcgcgtcaatgctaggtgttgatacacgggcaactcgtgacgttgatacctcgatcaaaggcttgccggtaacaaaagaggaaatcctcaaagtgtttacggacatcgctgatatgaacgagccagacagcgacgtaacaatcagaattgctaagattgacgatattcgtgtcgccgcagaatacgctgggtttcgcattcatatcgaagcaaagatctacaacagcgtcgtagatacgaagatcgatgtttcaacgggggacacaatcacgccccgcgaaatttcatggcatcatcgtacgatttttaatgatcaagatattctagttatggcttacaatatggagaccattcttgccgagaaactcgaatccatggttgtgcggcaagaacttaattcgcgtatgaaagacttctacgacttgtatctgttcgataaggtgcaacggcagaatattgatttcaaagtcttaaaggatgcattgcacgcgacggcggatcttcgtggttcggaagcactgttgccgcgatactcagaaatcattgcaacattgcgtgggtctgtgctattgaaacagcgctgggaaaagtaccgagtggcctacgtatacagtgagaacgtcacttatgaagccacctgcgatgctgcattagatctggtgaacgagatcggattaccatagatctactcctcatcgccttcatctgcgacattggtgtaagtcatgaccaagccaccgtcgtcgccagtagtgacgttgaaccaaaagcgcttcggaaaacgatcagcggtaaggccgccgggagcgcccatccagatccgtgaatctgggtactcgtgggcgtgcattgccatccattcaagttggtcttccgcgtcttcgtcggattggaaaggcaagttctcgtgaaagtcgttgaggaattgcgcgtggttttcgattttgacatcagtgctcatttgatacctcctgttctgttggggttgcgggtacggtattggctacggcaacaatttcggtgaggaaatcatagccgcgcggcactagtggtgtgtaaaattcagagatcacgctgccgcaagtgtccacatagccgcgtcccttgatcggtttttgaaagaagtctttattggtttcgccgaacatcatggaatagcccagctcactcatgcgcccaagcgcaacgcggaacatgaactgatctcttatcccgtcgcctaaatattttgcgtcaggccgttggcaagccaacacgaggaagaagccggcttgacggccaagcatgacaatctgtttgagcttggacatgacttgcatagcatcgcggccaagcatatccatgaaggcgacatattcatcaaaaatcagaaagtgggcgggtagtccaagataggcgtagttctcgccggtcttgtacccgtccatttgtttcattttgtcgttgcgcgccatcatgtcctgatagaaggtttcaagcgcaccaagcatggcctccttcttcgagtagacccctggcatcacgtctgccagatcggcaaggtcggcatttttcgggtcaagaatggtgagttgggcaccgtctttcagaagtgcttcaatcaacgtcaaaatgaagtaggtcttcccaccaccagtgccaccagcgattaacatgtgaggcagtgcgtcatagtgccaagccacagtttccatgagctgaatggagccgtgttcacaggtcacgtcagcaatggtgatacgcttgccgatcgtgtcgtaaagcaaggtgtactcgacataagaatcgtgcaagatcttgtctaccagctcacagtaaagaccggcttcgagcttcttttccaagtgcaggagctgatcttgataggaagacatgacgatttcaacggaaacgtggatcagcccgtctttgagccggtagtagattttgggaaagtgcgagatcttctctttggtgcgcgttgagcctaagtccttgaagaaactctcgctgttggtttggtcagtttggtaccatttattctccatgatcatgcgggcgagcttttggcggtgttccatctgcttgtaggaatccgcaaaccaagttcgatatgaccacaagccagcgccaaagagtagcgctgtgcataaactgttaataatcagcggtagccatgaccaaggcaaggcggccacgtccggccaactaaacaacttccagttgatttgtcttagcagcggccaataggcaatggcagctccagttacccacaagcaaaccacaaccgtcatcgccgtgttgtagagtaagttgcgttgacggggatagacccgtgtaccgcgatacgtgagtttcattcgtcaatgttcactccgtcgtagccaatcacgagaccaagtggactacttgaaacgttgaaactaaagcgcgcgccttgaaggtaggcttcgggtttcgcacactgctcgctggctaaaatcaggtcacaagcattcatgccagcttgaatcgcgtgattagctgcgtcgattaagttgatgatgacgtcaccagtgggtgatgcaccgttgtcaaagtcagcgatgtgttcgtagtgaaattgaaagtcgtccaggttgacgagggttacttgatcattcatagaaattctcctttgggcgttacttgacgccaatatatttgatagcgggttgtcggtcttcggtgtcgatattgaaactgaactctttggattcatgatcgcgggtacattcgccgtctacccaaatggaaaatggttcatcaggattggcctgttcggcggccatcagtaccatgtcgatcaaagcgtcagggctggggtcgtggtaatcagggtcaactagttcgggatagtcctccaaaaagccgtcaatgcttagtgcttgtgccatgtcatcagtcctttcattcatcgctgacgcccagatacgagagccgcaagccatcttcaccttcgtatgaagtgaacgagaacagcttattcatgccgtcgttggtctgttcactgtcgaaatgtaggtgttggtaagattcagggctttcttccatgagttccaccatgtcttgcagaatctcgtctgggtcaaggcggtagtcgttgtcgatttcttcgttatagtcgtcgatgaacacttcacgaccaactacggtcaatgtggaagtcatcatctatggtcaactcctttcatgagtggtaagcaaccgccgcagcgggcggcgcgcgtgaggagtggggcaatgagctatttcttgtcattgttgcttggcttctcctgtggcttgaccggtgcggtggcaatcacgagatccttggccttcatgtaccacgaagtttcgacgcggttgaagttcgcgtttgccacggtgtcgatcactgggtcaaccaaagtaacaatctggttgtacttaaagtctttgaccccagcttctgccggaattgaaacttggatcatcattccttgtttcatggacttcaagtcataggtgcgttccttcacgtcgtcggtacgattgccgtcttcgtcttgcacgaagcgttcgcggcgctggccggagaatttcaagacgccaaaggtttcttcaagatcgataacgatgccttctgctaatcgcatgtgagttcctcttttcttttatttggctgggacaatatcgtcggcattgcagatgtagcgcacaaaggcttgttcaccgatccggtagccgacggtcgcaatgcgcggcttgatgatggtgactggtgcatcaacttcaatgctttcggccttgtcacctttcttcgctggaatggtgatctcgatgttgtcggtacgctgcaagtcggagaacaactcgtaagtgcgggagacaaccttgcgattgtcgcgatcaccttctgacagttcgcgcttgagcgaaccgaagtacaggtggccgaacgtcttttcaatatttggtgcaacaaatttaagttccatgttgtagccttcctttcgtattcaaaaagccgggtagtggggctactcggctgtggcttggtgatagtattcggttagttgttgaagtaggtagtcgtaaaacgacttggaaattgggtgaaccgtgcgaccatcagcgtatcgtggaaactggatataccagcgatactgaccttcgatgagcttcacgtttttcaagatgagcacatgatccagtacgatgtcgccatggagcagtacgtcgccaccgggatcagggtacatattgatagaagaaatgcgcatgttacttgccgtctttcttcttggcaccaccgatcacaaccattgcagcgaggacgccgagcagcagcactacaccgatgacgatgagccagccggaggtcgcgttaccggtttgtgggaggccaggcttaggtgtctgcttgtcggtcatgacggccttcacgatttcgccatccttagtgatctcgaatggcacgagggcttcactaatttcgtagccctttggtgcgtcgtattcttggaagctgtacttgccagcaggcaaattgccgaaggagaagcccccgttcttgtcggtgcgaccagatacgaccgtcttgccgttttcgtccagaatgcggatgccggtgtttggcagccgcttcccagtagaaacgtcggtcttggtcagttcgcctgtgcctttgatcaagtcgttggtcagttcaaaggcaatcgcgggttccttggcgtcagatttggtctcgccgatctgcttgtctttgttattaaacactgtcacgccgtccttggtagatacgagcttgagggtttccttataaagaacaaggttagtagcagaaggcttggattcacggagatagaaggtgcccacaggcaagtgcttgatggagccagtggaatccttgcaaacggtgatggtctgaatgacctttttgtcagcgtcaagcagttcaaaaatcgcaccagcagcgttaccggtcatcgcgtaggagtagcccttacccgaaaccagcgtggcaacttcattgatcttcttgaatgacagttcgttttcgtggagcttgttgtcgatcaccttaccgtcattgaggtcgatgtgtttgatcttctcgttgtcggtggtgtggaaatggaagccgtacatggtggtgttcaagtcgtgcttctcaccggcgtcaagttccttgacatagtagtagccttctggcaactggatcgcaccaaattcagccttaccgtctttgaccgtcgtggtggcaacgagtgattcagaaggaatcacagtgtcgccgatcgtggtttcgccttgagtgaacaagccgaagacctgaccattggcagcgacgttcttgatttctgggaggttgtctttccaaccggcgatgctttcttcttgcttgttgagcgtgatgtcgagttgttgaaagtcgttcttggcttcaagtgaggtggaggtcaccgtcacttcttgcccggcatacttgagttcaaaagcgatcggctcagggttcatgatgaaaccatttggcgcagacaattcagtggcagtgtacttgccgaggtacagctctggggtctggatttggccttgagcgtcagtggtgccagtagcaaccacgtcacccttgtgggcacgaacggtgccgtcagcagtcgtaatatcttcggctgctttgaactcgaacttcgcaccagcgagggcggtgtaatcgtacttaaacttgtactgatcgccgtattcagtttcaaccttttcgacggcgactggggtagccccggtcttggtcaaggtggcgacacccttttgggagaggtcagcgaacttgatgaccacgatgccgtccttatggctaccgtcgatggtgaacttggctggttccttagccagtacatagctttctggggcttggacttcttcgagctggtacttgccgtagccaagcgcttcggcggtgatcagctcgccggagttgtcagtagcaaacttgtcagttgtaccagtcttgtcggcagttggctggacttcgtacttgttggtttgcaagttcttgatccggaaaatcgcgccagtgcgcagcacgggcttaccggtttcggtatcgaccttaacaacacgcagcttttcttcgataaccttgttttcgatgctgtaatgctgggacttttgggtaccgtcaaccgtgactgtgaacggcttgatgccgttatagccggttggagtcttggtttcagtgacggtgtaggtgtcgtaaggcaaatccgcgaacttcacgtaaccctgtgcatcggtgaggccagtgcgaacaaccttgccagtggtcttgctggtgacagtgaactgggtgccctttagcatgactggcttagtgcctttgccttgagttgcccagtcgtagttaccgtacttgagcaagtcgaggtcgccagtgatgacttgttccttgaccgtcgtggtagcggcggtagtggtcacgttctgcccagcgtatgccagcttgaagggatgcttttgcggatcaagcacgtagccagtcggtgccttcacttcttgccagtagtaatcgtccagttccaaaccggaaacagaagcgatgttgttggcaatcgtcaccgacttcacgagcttgtcatcggctgcacggtggagttcgtagacagcgcggttaaggctggcagcgccttgtggctgcttacccgtaacggtgtcaactttttcgatggtggcggtgccgcgttgttcttgatcagtcgtatcgacgtgagcagtagtgaccgcgacagtttgaccagcatacttcaattcaaacggcagcttggctgtattcagaacgtagccagcaggagctttttcttccagcgcgtagtagctaccaagcttgagattctgcaaggtgcctctgccgttaccgtcagtggtgattgcgccaacccgtgtgccggtgcttgtgtaaatgccgtagacagcaccattaagcgagtagtaggcattgaacatgtcgctaccgaactcacgcccaatcttggcgagggtcacgttaccgagctgttccttgttgccgaggacaacttcaacggtcttgccgggttcgatggtgacttccttgagttcacccttgttgacgtagccgttaggggcagtgacttcgctgatcttgatcttggtaccagctttgatcccattcagagcagcatagccgtcagtgccagttgtgacttcctttgtggtgccagcgtattcaaacttgagcttagcacccggtagcgccttgttggtgtcggcgtcaaccttcttggccttcacgttaccgttcaagttgaccttgattggcaggctaaactcaccgttgttggagagcttgaagttgacgagtttttgttgtgagcctttcgtgtagacgaaagaagtaccaacgtcagcggcctttgcaatcgcgtaagccaccttgccggattccttcgactgggcagtagccgtcagcgtgagcttgttgccggacttggtgatcttgaggttcgcggtgtttgccgtttgctgggcgaaagctgcgagccgtccgttggtgtcagtcaacgtgattgaatcaccaacggcgagcgtgatctgtttgccgttgaaagacggcttacgatcatgcgcggcgaccttatcgagaatcgctttcttttcagactgataggtcttgtttggtgtggtgagcaacgaatcgccgagcgtttcccaaataatcatctgggtcacggcgtagttgcgattggttggtttttggtagtagccgtagtaagcgatcttggctagttgatccttcttagcgtcggagtaggcgctggggttgtagccagagccgctcatatcgagatcgaccccgtgctccacacagaaggcaactttgccgtccacctttttcatccacataccggtgtccgtccaatgtaagccattgaacagatgcaggtgccaagtatttcgccagtcagcgaccttggtgttggtcatactggcggcgagagcgattgaggcggggacaaagagttggacgaatagcataatcaatgcggcgaaaattgaggttcgccgagctgctttcatcaatgtaatttcctccatatttagtgatttgttcttgattaaaacgaattttgaggacaaaaaaagcaggtctggttacaacctgctttacgttcatttgtgcgtttgctttgcgttaatcgtagctttacgaaatgcccattttgtaccaaattagggcgtcacgctcaaaactcgttgaaattccataaaagtgagtgaatagaaacgttgatataaagggactttgaaactcggtgaaaccgtataaaaccgaggaacgtaaagtacggtcttaagaaagctcgtaaagcttcacaattcagtaaacgttaatatcacttttatatcaatgtttacaagcacctcgcaattttatattgcggggtgtttttttgtttttgacaccatcggaatttttaagtgtaagcctaatgcgccatcccagcctattcccaatatttttgctatgcttagagtaattgaaggaggcttttttatgtatcgttatgccgttatttataatccccactctgggcacaacaatggtgagtcggttggtcagaaaattgagcaggcactcatcaagaatcaacacaaggtcgaactgatgccgacggaagggccgaaagatgcaacgcggttagctaaaaaagcggcgcgggcaggctttgatgtggtggtcgctgtcggcggggatgggaccattaatgaagtcgttagtggtcttgcgacgttagatcagccgccttatttaggcattgtacctgctgggaccgtgaataatttggcgcggatgttacaaatcccgttggacattgatcaagcgattgaaaatctgcagcaggttcatctgcgcccactcgacgtcggccaagtgaacgatgattacttgattagtacaatgacattgggcattttggcggacgccgcgttgaacgtgactcagagtgaaaaacaaaaatgggggccgctagcttttttaagcaaaggcatccatgcattagcggagcatcagcattatccgctaacgattgaaacgcctgatcggcactggcaaaaagacacgcaattcttgctggtgaccctcacgaattccgttggtggatttaccaacttcaatcccgaagcgcaacccgatgatggttatttccatgtcttcgttgcgccgaaaatgtcgctagcacggtcagtgatgtttctcccttatttcttaacgggtaattttaaaaagattcccgggatgacttactttaaagcgaatgaaatcagcatcacagtcgacaatcagcaaagtgcacaaacccgcattgatggtgatccgagtgccaagtcaccattggagatgcgactcttagaacataagttgcaagtgattacgcctaatccggatttataagactaggggtaggttagagtcatcggtaaaacaaaaaagaattcaaaattttctaacgaaaattccgaattcttttttaattattgcgttaattcagcttgtttggccgcaacgcgttcactaatcttcaggaatggccagtagattagaacgccaaggattaaagtgaagccttgaatcacaggggcgcgccaatcgccgccggttgctaaataggagttgagtaatggtggtgtggtccaaggtaccatgacgactactcgattcatccagccaattgcggtgaagaagtaggcaatactgatgccaagtcctggcattaggacaaatggaatgatgagcgcaaagttgaagacaattggataaccgaaaataacaggttcgttaatgttaaataaacttgggacgaatgatagctttgtaatatcacgactagcgcgtgattttgagaagagcaaggtcgcaatcaataaacaaatagtactaccggtaccaccaagcatcccaaatgtatcgcggaaaacgttgttgatgatataagggatgtgttgaccagctgcgtaagctgccatatttttgttcatgttgatcagtaagactggatccaataaagtaccgttaatgacagcttgatggatcccaaatgagaagaggagattaccagtcccgtaaatcaaaaggagacccggtaaacttgtattaacgcgccgaagtggttcttgaatcacatttgtaattaaagtgatgagatcagtgtggaaaccagccgttaaaatcgcagcaagtgccgcaaaaagactcattgtaatgaggtctggaatcattgtgttgaaggaaccagcaacagctgatgggacggcatcactcaagttaatctgtaattttttaagctttgaaagagtcataaagagttctgttgcgactaaaccaataataatgccggcaaacattccggttgttcccacgttttggaaagttaagaggccagaaacttcgacggcttttttggcagctagtggtgtgaccggaacagtattaggcatcatgatgattaaagtccctagtgccatgacagccgcggaaattttgttgacgtaattcttattacgcgctaaacagtagccgattgtaggtgtgagtaatagcccagcaacgttcaaagtcccattggtaatgtaagtgccgaagtattgaaagttggttagcatttggccgtggaggacccaggggaatacaacgttattcacgagcaccccaattccggcgaggatgaatagtggcataataatcgcgaaggcatcacgtaatgaacgcaaatgcacttgattcccgattttaaaggcgatatttgtaaactgatcaataaatctttgtcgccgacttccttgtttaagcatagaaaacactccttttaacgcactttttttagtctaattgttcaccgttagattgaatgaccttttgcagccaataaaaactagccttcggaattctagaaaggtctttgaggtcgtgattggttcgattgacataaacgacgccatagcgtttattcatatcaccttttgaacttggaatgtcgattaacccccaaccaagatagcccataacgtgagcgccgtcttcatcaactgcgtctttcaaagcctggatatggtcgcggtgataggcaatccgttcgtcatcttggatcacttcgtgattcagtgattcttcgcgaatgccaatcccgttttcgattggaaaaatggggagggcagtttcatttgaaagtttcgttaagacatttctaaaaccgagggcgtcaatctgccagccccattcgctactttctaaataaggattagggacactcgcatcgcgcatgtaataattgggtggtgtgttgggggttaattttgtgtgatcgagtgcgacagtgtagtagtaactgaacgctaagaagtcattatggtgactcgcgattaacgccaaatcgtttggctgaatgctactcattaagtcatgattttgcatatattgcagtacttcggctgaatagtgaccttttgtaaaggcgtcgacgaaatgttggttgataaattctgatgcttttctagcagcaaagacatcttgggggtgactggttgcaggatagaattcttgataggctaacatcccaccaatttggtcattagggtagtgggcgtgtaagtaattggcgatttcagcatgcgcaaccattgtattattagcgatcgtataaagggttaataagtcgcgctctccgttgataaagccagtattatcaaagccaggttcaaagaaaaaaccattttgttcattaaagcttagccaatatttgacttgtccaccataacggtcaatgacagccttagcgaacttagtgaatgcttgtgtgacataccgacttgagaaaccattatatttttcagctaatgagtgaggctttttttgttgcattgatttgaagttgttgacaaaaattcatatcaatggtttaatggtttaaacttatgaaccattaaaataaaaccggagattaatgtatggatgaaatgaaggttattaaacagagctttgctgagctgagcccgtttttgacggcgcttggggatgagaagcggcagagtattattttagaattgatggctgataaagcttgtgatggcttacaggtcacggatttaatggcggcgtcggacttgtcgcgcccggcagtgtcgcatcatttgaaagtgttgaaggaagccaacttggtcgactttagacgcgaaggcacgaagaactattattacttgcaacacgaactgggcgaaatcaatcaactaaaaacactgctggatcagattacggcagtcatcgaaaaacaacagtaaaaggagtttttaaaatgcaaaccatcttaggtagtagcggtcagattggccaagagttagccaaggcacttcataaggacttcacaacggacattcgactggtcagtcggaatccaaaaaagtgaacgcgaacgatcaactatttccagcaaacttgctcgacgccgcccaaactgatcgtacggttgcaggcagtgaaattgtttattttaccgctggcttaccgatgaattcagacatgtgggaagcgcaatttcacattatgatgactaacgtgattaacgcgtgcgtcgcgcacaaggccaagctcgtctttttcgataatacctatatgtatgcgaaaaatagcacgctccagacagaagcgagtccttttgaacccgttggccgcaaagcggttgtccgagcggagatcgcacagttgttacttgataagatggcaactggcgcaattgaagcggtcatttgtcgtgcacctgaattttatggcccaggcaagacgcaaagcattacgaacacaatggtctttaacaatatcaaggcgggcaaaaaggtgcgcgtgccattgaatgatcaagcggttcggacattaatttggacgccagatgctagtcgtgcgatggcgttgattggcaatacgctggatgcgtttggtcaaacgtggcacctcccttgtgatgacggtaaaacatacgccgaaatcatcgcgctagcaggcaccttaacgcatcaaccaatcgactacaccgttttaaaaatgtggcagttcaacatcggtagctggttcagcaaaccgctaaaggaattaaaagaactcctacctagatatgaagtagataatctgttcagttcagacaagtttaagaaacggttcccagaatttaaggtgacgacgattgaagaaggggttcaggagattctttaaaaagtcagcctttcgctcgatagactaaccattgttcaatattatataatcgctttaaagtagcgatgttagtcaatcagataaggagcgtggcatgatgaagaaaccttttaataagcaacaagtgaatggtgaaccaaatccggaatttgattccttctttgcggaagtcttaaagaagttgccgcaacaatcggcagctgtgattgcgaagtcttttaaccagtccaaagcattggcggaaaagacgatggcgaagagtcggacacagtttgatggggtctttgaagacttcctagtcggtgtggatgatcagatgcgtaaaaaggcacacaatatcattcacgcagcatcactaacagcagcgattattggctgttcaccaattccattttccgatgcgttcttgttggtgccggttcaattaacgatgatggcgcgtttgcataaactattcggtcaatcttggtcggctagtttgggtaagagcctgtcgaaagaattggtactcgttggcctaggtcggagtgcagtcggtaacattctaaaactggtaccggtcgttggaacggtcaccggatccgcggtcaatgcgaccgttgcgatgtcgattaccgaagcgctcggctggttaacggtcaagatgttgaacgacggcgaggacatcttcaatgatgttgtttcatttaaaaatcaattcagaacgctatttggattgttacggcgtaagtagttatttttcaattgacagaataagaacgaaatgatttaataaacccacatcactaatttttaggaggctaaccagatgcccaaagtactaattgtccacacgaatgttacgcgttatcaaggaaccaccgatccaaccggattatggctgggggaatccgcagagttcgttgatgaattgcaaaaagcggggattgattacgattttgtcagtcctaaaggcggcttcgtcccgcttgatccacgggggatgaagtacacggatgaatcaattctgaccatctatgaacaaccggattacgtgcaacgggggttagtcgcaacgctgaagccaagcgatatcaatccagctgattacgctgcgatttactatacgggcggccatggtgtgatgtgggattttcctgataatccagaattacaaacaattgcccgggaaatttataatcacggtggctatcttgcgtccgtttgtcacgggatcgcgggtttactacgcattaaaaatgatgacgggcagtatctgattgctggtaaaaaagtgactgggtttaccactgcagaagaaattattgcgggcaagaaaaaagtggtgccatttttaaatcaagaagtggcaacccaaaacggcgcgcaatttgtgcaaaaacggttttacaaaccatttgctgtccaggatggtcagttgattacggggcaaaacccgttttctgtacgagaagtgacgaagcgcttgattccgaccctacaaaataacggttaggcattctttgaattctatgctaatcttatagaatgtagaaaagttaggagtcagaagatgagtgaaaaacaaacaccaaaattaacgcaaaaagaaaaaatgcaagcactaattgatcagaaaaaaggtggcggcagatcaaaacagaccgacgttgctaaaaatgatcggacaaagatgcgcaaaggaccaaagatttttaacgaaatccactggtaaagagtgcgtttggttgcggttagcaactgagcattaagctaaaatccgcagtaatccaggttttaggagtactgcggattttagcttaagcggaagttgttgcaaccaaaaagcacgtttcaaacaaagtgcgtttgaaacggtttggttctgagcattaacctaaaaataagcactatggcggtccttgccatagtgcttattttgtagttaagcacaggagccagtttcaaaaagcacgtttttgggctagggcaattttgcgctagccctttttgtgttaacgcgctatgctagaagcaacttattttaaatcgaatggagtctttgtatgtcatctttaatcgaacaaatgcaacaccatgtttcagttcgtgatttcgagccaacacccctcagcacgacagtgaaacaacaactcattgcggcagctcaaagtgggtcttcttcgaatttcgttcaggcattttcaatcattgaagtgaccgatcccgtaattcgtgatgaaatcgcaacgatttctcaaagtgcggcgtatgttaaacagacggggacgttctatgtttttgtcgcggacttataccgacaagccacactcttagaaaaagcgggccagtcagtagctggcattcaaaatatggaagccttattagtcgcaacagtcgacacagccattgcagcagaggacatggcagtcgctgccgaatcgttagacttaggcatctgttatatcggtgggattcgcaatgacattgcgcgtgtcgctgaactactcgagttgcccgcctataccgtcccactatttgggttaacggtcgggattccgaagactaaaaatcaggttaaaccacgattgccgcaagttaatcaagtcgctcaaaatcaatatgatgtgcatcaggcaaccaacctagtgcaatacgatcaacaaatgcaaaattattatgctaatcgtgggaccaatcagcaacaaactgattggtcgaccaagaatacggccttctttagtgaagtgcgacgaccagcagtggcgagttttttgaaaaaacagggctttacgttgaattaagaaaaaatggtacttatcttaaaggacaatcagttttctgattgtcttttttttgtgtcgtgcaagctcggatatgcgataataaaactagtcaaatgtaaccggttaaataggtataggagtgatcgttatgagtttaattgatgtacgacatgtagccaagcggtatcagatgggcgagacaacaatcgtggccaatcatgatattagttttacagtcaatgaaggggagttagcggtgattctcggaccgagtggtgcgggaaaatcgacagtgctgaacatcttaggtgggatggatacacccgatgaagggcaagtgttgattgatggtgtcgatattgcgcagtttagtgcgcaccaattgacggcgtttcgccggactgatgtcgggtttgtgttccaattttacaatttagtgccgaatttaacgacgcaagaaaatgtggcgctggcaacggctgtctcgccgaatgccttagatgttgcgcttgttttgcaacaagttggtctgcaggatcggcttcagaattttccggcccaactatccggtggggagcaacaacgggtggcgattgcgcgggcacttgctaagaatccgaagctcctcttgtgtgatgaaccaactggcgcactcgattatgaaacgggtaagcagattcttaaattattacaagaagttagtcggcaacaacaccggaccgttgttttgattacgcacaatgccgcgattgcccagatggctgatcgcgtgatttacattaacgatgcgcgcgtgcgttcaattgaagtgaatcccaacccacttccagttgaaaagattgaatggtaggtggttaatatgcagacacgtttatatttacaaaccacattccgcgatattcggcaggcgattggacggttcattgcgattatcctgattattttaatgggtgtcttattgtttgtggggattaaatcgattggcccgaacttagaagagactgtggatcattttgtcaccacgcaacgcgtatccgatttacagattagtgggaccgctggcttaacggaacaggaccgtgcggtggtcgaaaaaatgcatggtgtccaagctgaattgggttatcggattccgtatcgcgatgaagcgcgggatgttaacttacaattatataattaccaaccaactgcacggcaaaatcgcttaacgctgactaccgggcgctatccgcaacgaacgaatgaaattttagtggataacgcggtcaagacgtattatcgtctggggcagagggtgacggttaagagtcagcagctattgacgcaccggtttaaagtggtcggttatgtggactcaccgctatatatcgaccgtcaggaacgtggaaccgtaccggtcggggatggtcagctagatggctttatgtatttgccacaaaaggcatttgcacctcaaccgtattcggtgatgatggtgcgctttagtgatttggatcgtcacagtagctttttacaggcttatcgcaccggcattgcgactaaagaaacacagctcatgcgccaattaaaagcacacacaactcagccgcagcaacagtacttactaactgcgcgcagtgctaatccgggttttaatgaatttacgagcttgtcggatcgcatcgatgcgatagggaatgtctttccggtcttctttttcttaatcgggattctaattacctttacaaccattacgcggatgatcgaagaaaatcgtaaggaaatcgggacattgaaggcactaggctatcgtaattgggaaattgcgcagaagtatttactatatgcgctactaacaggtagtatcggcaccgtgcttggcaccattttgggcacgaagttattaccgctagtcgtctatcgaatccaaaaaccggtctacacctttgcgcattatccaacccatttttggacagttccaattttattagccactggagcggtcttgattgcgacagttggggccacggggtatgttttaatccgcgatttacgcgagaagcccacccaattactccgaccaaaagcgccgaaaccaggccaacggatttggttagaaagaatcacaccgctctggcggcgattgagtttccatcaaaaagtaacttatcgtaatctttttcgctataaagcacggatgattctgaccatcttaggcatcgctgggtgtaccggtttaatggttgcaggctttggtttaaagacgtcaattggcgaagttgctgaccgtcagtttaagcaattgacccattaccaagcaattgtgacgcttaaaataccgaatagtacagcccaaacgaagtcgattttaacacagactgagaaggttcggtcttacttaccggtcacaatgacccaggttaagttcaagcaaaaagggattacggatcaagcggcgacagtctgtgcggtcgctgatcaagcaaaacttgcacagtacgtcgctttgcaaacaccgcgagaacaacaacgactcacattgccgaaacacggtgcgattattgctgcgaacctcgctaaaacatatgctgttcaaaaaggcgattggttaacgctacaaacggcacaggggaaacgtgctcgcattcaagttgcagggatcagtgaaaattatctcggtaatagtgtctatctccgccaatctgctctttcaaaaacgctacaacaaccagttgcggctaatgcctatctcgtgcgcaccgctaagatgactaccaagcaagaaaaacagttggcgacccgtttgcaacaaacaacggaagtggcggccacaacgtttatcagtgatcaaggggctaagcaagcaacggctagtgctaatttagacccaatcgtttttattttcatcgggttatcagcggttttagcgtttgtcgtcttattcaaccttactagcatcaacgtttcagagcgggaacgtgaattggcaacgattaaagtcctgggctttttcgacaaagaagtgacggcctatattgtgcgagaaaatgtaatcttcaccgttattgggattgtgcttggctttggaatcggtaaattgctgacttggttcatcatcacgatggcctcgtcagaacaagtggcctttccactcatcattccagctagcggctacctgattgcggcagggatgacggtgctattttcactgattgtgatggggatgacccatcgcaagttaaaagggattgatatgattggtgcattaaaggagaacgaataaaagttttagcaaataatgcttttttacttgcttgtgacgttacgtcatcggctagtatcaaggtatggaggtgatattctatggcgcaatatacaacaggtgaactcgctaaattatgtaatgtttcggtgcggacggtgcaatactacgatcaggcggatttgttgaagccggcaagcttaactgaaaatggacgacggctgtatggggatgcgcaagtgcagacgttaaaagtcattctaggctacaagcagctaggcttttcactgaaggcaattcaaaaagtgatggcgagtcaagcttcgacggatacactggcattgttagtcgaacaacaactcaatcagttagtccaaaaagaaacagacttagctaaccagaaagcagcgttgcagtttgtactgcaatcgattcaaaatactagcgcggtgccttttgaaatgacaatcagcgacatagaagacgcaatggctaaaacaacacagttaaaaagattacatcggcgaatgctgatgtggggcttattgattgatggtgtggaaattggcttattaattcttgggtttctaagtggcatttggtggccaatgtggattgggataccggtcatcattgcgatggccatttatgtgacaacattctactatcaagaaactgtctatctatgtcccaattgcaagacggtcttcaaaccacgcctaagtaaaatgttctttgcccggcacacgccaaagacaagacaactagtgtgtccaagctgtggacaaaaaaattactgcatagaacagagtgcgtaagcaggcgttcgtatttttaggattaactggatttgccgaattggcgacgcaatcgctaatttggcaaatttggttagccacagaaatatgcctgctgaagcacgtttaagaacagagtgcgtttggtcgcggttagcaaatgagcattaagacaaaatcaccagtaatccgtttttggagttactggtgattttagcttaagcggaagttgttgcgaccaaaaagcacgtttgaaccaggtgtgcgcatcaaacccaaaaccatctaagctgggacgatttcgtctcagtttttttgagtcagatactttataatagaagtattacaaaaataaggaatgatgcaaatggaaacgacagtgatcatctcgacgctctttcggttggcaaaagtcttcgatgacatgggtaagttattgttcaaagcgcatttagatgtgccgttgacgtttgaccgtgcgcaatcgcaggccttattacggcgcaataaccgactagaattcagctatcaacaacttaaaacaagtaaaacaaaactattaaatcaattattggcgacggcgggagccgatccctatttgtggaccaagttacggcgactgcaggcattggatgtggcgagtttggcagccgttcaagcaaatccgcaatttaaccgccaacgcaagattaatcgtttgaaacaactgattatcaatttacaaaatgaaaaaatcaatgagagtacggtactgacgaagcaggcgctcgcctatttataccatgtagcccctgataaagtggcggccacgagtaagccaggaccgatactggccgatccgtttgatagccgcgcttttaaaatggacatgatggcccttaattatttagatcagtattttaacgtgcaggaattgcaatattacgtgaagtacctcgtgtttattcacgcgcatcaagcggcggaagcggtgattcactatgacgcgcgaacggttttgccgaatgcggaacaaactggtttttcggcaattgcctattacgtcacgcttaatcgccaatcgtatacctacatttcctacaaggggactgaggggacgatggatgatccgcggattaagtcgtttacgcagcggctggataattatgtccgtgagagttatcaagattggaagtataatattgatgcgatgctaattggcaacaccgaaaatgatgagcaactccaactcgcacggcggtttacgcggtatgtggtccggcgggtgcgccgaattaatccggcaacaatcatctatggactgggtcactcactcggggggcattttgtgcagacggtccaattattggatgaaccgtttgatggtggctataccttgaatgctgccccggttcagttaaaacaaataaagcattatcggccggatcttttatccgcttcaaaatggcaacaattattcgcattgactaagcacaacaatacgcaagatccagctgtagcaatgcaagtccacgcgattttgggacataattacgctacaattgaaaatgaatggttcattaaagatttaacgcggatctattttggctttccgtatacgttctacattgggacggcgcgttatttgaatgctaaaaattggcattacccgtttgtgactgacgtagcaccatatctccgaaaagatgagattcaggcgtatagccagttctggggcaatctaattcgctatttgaaacgtgttgagactagaaatgggtcgttgatgttggcaagtctgatgacatatggactgcagacactccgtgaagtgtatgccgcgattaaaacggaacaggcccaacaaatttttgcggcatatgcgcgctatttatacgatgcgcacatttttaaagacacccccgttcaggtacagaccaattttgaacgggaattatcacggccgcgcacggcactccgtgtgttacaaggcgaatggccatttttgaaaagcgtcaacaatgagatggtcgaaacggtgattttcttccacacgattgaaggcgctcaatactttacacgctagacagatgggatgttaactaatggatatttatttgaaacaagcaattttacaagtggtcgaccgcgaactcggcgatccaatttactcacaacaggtgctagatcttaccaatgggaatacacgcgactatttaaccaacaagattaagaaattatcgtctgcccagagtaagaccggcgtgctgcgccaagatgctgagctcgcatcttttctgcgcgatgcgacagctgattttatcggcgctagccaacgcctcgttgaaaaatggtacacggtctatcaaaaaagtgacgatgcaccgagtgcggatgcgtttgttgtcttgtatgaacaagatgcgcaagcttacttggcttttttgaaggtcgattatcatcaagccttcacccattatgtcaatgctgaagagggaccattgatgaatcaactgattattcaccaatcgattctatcgaataaaacgcaaaaggcggacgaagggtttgcgattaacctccagacgtttggctttgaattgatggagaagaagtacaccttctccggtgaaaagatgacctacttatcaacgaacgtgattgaaagcgaaccagcgccatcgctagaagaaaacgtcaaggttgttaaaaaagccgctgaaaaaatcggcaagaaattcgaagttgccaaacacgatgtggtcgccaacgtcaaagaagcgatctacgacacgattgaaaccaatggagaaatcgatacgagccagatggcggcgaagatttttaaagacaacgtttcagcccaaagtgagtttaaagcagaaatgacggaaaacgcgccagcagcaccagcgccaatctcaccagccgtccgcgaaatcgccgaaaagaaatacggcaaacaaaaactcaaactctcaaacggcatcgaactaatcgtcccaatcgacgtctaccaaaacccaaatctatttgaattcatcaaccacccagacggcacaatgtcggtggagattaagaatgtagaagaagtgattagtagattatagagtgcgtagacaagcggttatattttgagcattaactggatttgcccaattggcgatgtaatcgccgattgggtgaatttggttaagtacagaaatatgcttgccgaagcacgtttagagtgcgtttgaagcgggtcgactttgaggattaacctaaaaatgtgacttatgacgggtttggtcataagtcacattttgtagttaaccggaaaagccagtttcgaaaagcacaccaaaaaagagcatttctctcatcctatcgagaagaacgctcttttactatgcctttctttttgcccagattaaacggataatcttatcgaattccgtgatgattagaatcaagaagcctgcgccgatcgaaacgccccattctaataaggtaagcggttcggtgtagaaggtttgttgcatgaatggcacgtaggtcaggatcaattggagaataatcatcagtgcgataatgccgaatgccttttggttggtgaagaaagcttttgaaaaggcgagtttcgcagtccgaatattgaacaagtagaaaatcttgctgatgacaatgatattgaccatcattgtgctggctgtgacttgatcgacaccgcggccgagtaaccaatcgtaggctaacaagccgattaaggccatcaagacggaaacatatgccatttggaaaacatcgtgtttattcatcagcgcttggccggtcttacgtggcttgcgggtcattaagccatcttcagctggttcgaagatgaaggcgaattgaatcgtaatcgccgagaccatgttaatccagagtaactgcgtcgcttgcaacggcatatcttgttgcatcaaaatcgtgaaggcgatgattaagccttccgcgaaggaagtcgggagtaagaagagaatactctttttgatgttatcgtaaatccggcggccttcacgaattgcgacggacattgttgcgaagttatcgttggttaaaatcatatccgcggaatctttggcaacatcggttcctttaattcccatggcaaccccgatgtcagcgcgcttcaatgcgggcgcatcattgacaccgtcaccggtcattgcggtgactttgcgactggcttgtaaggcttcgacaatttcgagtttgttatgtggtgtggtgcgggcaaagacttggtgttctaaagcggcttttggtttttcagcgtccgacaagcgatcccattccggcccggtaatcgcattaatcgttggtgctaagcctaacttttcaccaattgctttagccgtcagtggatggtcaccggtaatcatcttgacatcgaccccagcagcgttcatttcggcgagcgcttggatgacttcatcgcgtggcggatcgataatcccggcaacccctaagagttgaatcccttgttggagttgttcatgggtaattgtagcagtcgttgttggcacgtcgagataaccgaccgccacaacccgtttgccttgttctgataaacgggtcacatcggcattccagtcatcgattgggaaatcgaccattgcctgttgggccattgggaataatttatctggagaccctttgatatagattcggtgcgtaccatcagttagttgcacgagtttagcaatgtagcggtaatccgaatcgaaaggtaacatgtcaatttctgtatttgttggtaagtcgtcgataccatgaaccttatgatataaggttaaaaaggcaccgtcagttggttcaccgttaatggtccaaccattgtcggcttgataaagcgtcgtatcgttggcttcataactagcctctaagaattgtgtgagggtggtatccaattcagcaggttggtcatttaataaaatctgaccttcgggcgtatagccattcccgctgacttggtaagtcgtttcggcggtaataatttcggtcacggtcatttcgtttttagttagcgtccccgttttgtcggtcgcaatcacgtcgacggagcccaacgtttcaacggcaggtaagctcttgacgatggcgtgtttgtgcttggccatgtcgctgacccccattgcgaggattacggacattgttgcgggtaatccttcaggaattgaaccgaccaccatcgtgacaatcgcgattgctaatactgagagtgagtaatgttcgccaagtaagccgaagaggaataaaaagacggccgcaccgatgacgacaaatgaaacgccggtccctaagccgttgatttcgcgagtcaatggggttgggcgggttttcgtttcggtgacagcaactgagatttgcccgatttcggtatcagcggcggttgcgacgaccacgcctaagccgctcccgttagtgacggaagtggaggcaaaggccatgttgacttgatcggcaagggcaacttcttcttcggttaagcgtgttgcaattttttcaactgagtctgcttccccggttaaggctgattcttgaatacgcagattatcggcatcaacgattcgtaaatccgctggtacactatcgccagcttctaggaagataacgtcgccgaccactaagtcttcagttgggatgtcgatccgctgaccgtcacgataaacggttgcttcggttgccaacatttctttgattcgttccaaagcatcagatgcgttcgcttcttgataataaccaatgatggcattaatgatgactactagaccgatgatgatggcatccgaatagtgacccatcatgagtgttaatagggctgcgacgattaggatgtagatgattaagttgttgaattggcgcacgaaaagttgccacttcggggtgtgatggctctcgagtttattcggaccattggttgctaagcggttaaccgcttctgtttgcgaaagcccctgttcaaaatcttggtgggcataattggtttgcagttcgtctaatgtttgttgataagcgtgtgttttagtcatggtaagctccttttaattatcgaaagtcaaaatgcggtcgttcgtgatcgttattcttgccgataataaggaataatctgatggattaaacaaaacgcttcgcccgagccgtcatccaaaaatactcacctccagttagttattactctaaaattatcatgaaaaaatagcgatgtcaatctaatgaatactattaccaattcaacgtctaaactttgcgcccagtgtggctttgtggtaatattattacataagttaaaaaaacggttgaagcattgcgcgttcaagatttccttctttagggtggtagaagggaattttggcgtgctttttttatggagggaaatgaatcaatggcaactttagcaattattttaataagtactttattggcaggacacatgagcaaacggattggaatgccggctgtgattgggcaactcctggtagggattattcttggacccgcgttgttcggtgtcttacatgaaaattcttttatccacacgttttccgaaatcggtgtcgtgttattgatgttcatcgctggcttggagagtaacctgaccttgttgaagaagtatttcaaaccaagtttagtggtcgccgtcttaggggtgattgtcccggtgatcagtatgtatgggatgagcttggcctttggtattagtcaacttgagagtttattcatcggggtgatttttgcagccacctcagtatcgatttcagtcgaagttttacgtgaattaaacgtgttagaaagtaaagaagggacgattatactaggtgctgcggtagtggatgacttactggccgtaattatcttgagtgtcttgaccagtctttttggggcgcaactggctgcagctagttcaacccacatgagtttggggttgagtttattgctgcaagctttattcatggttgcggtctactttagtgtgaaatggattgtgccatttgttatgcatttgagtcgtcgtttgttagtaccatatgcgagcgccattacatcgttaatcatttgttttggatttgtttggttcgctgaggccgttgaattgagtgcggtagtgggcgcgtttttcgcagggattgcgatttcgcaaaccccgtataagaaagaaattaatcgccatattgaaccgatcgggtataccgtgtttattccggtattctttgtcagcatcggtttatcgatgaacttagcaagcttgaatcaacatattctatttattacgattttaaccgtgttagctgttttctcgaagttaattggaagtggtctcggtgcgcgttggatgaataattcgccacaaggagcctatacaattggtgcggcaatgatttcgcggggcgagatggcgttaattatcgcgcagattgggtacaacgctaaattgttgagtgaactttattactcagagattattttcgtgattatcattaccactgttttggcaccgctgattcttaaacacgcggtgaaacgccaattagcaactgaaatcaattaagaaaaatcgtcagctatttgctggcgattttttttgcccttttttaaagttgacaaaaaaaggattgagcagtactcttatcaagttaagaaaaacatgtatttaattacatgatatggaggtttttaaaatgacaaaacaatttaaagaattagaagatttcttagggacgcatttcatttacacttacgataatggttgggagtatgaatggtatgcaaagaacgaccacacagttgactaccgaattcatggtgggatggttgcaggtcgttgggttcgtgatcaagaagccaacatcgttaagttaacggacggcgtcttcaagattacttggacagaaccaactgggactgatgttgcgttggacttcatgccaaacgaaaacaagttacacggcatgattttcttccctaaatgggttgaagaacatccagaaatcacagtgacctaccaaaatgatcacattgcactcatggaagaatcacgtgaaaaatatgaaacatatcctaagatgttagtgcctgaatttgccacaatcacttatatgggtgatgcaggacaaaataacgaagacgtaattagcgaagcgccttatgaaggtatgattgaagatattcaagaaggccggtatttcgatgctgactatcgcaagattcaaaaataggcaatctgcttaaccaatcacaagcatctactaattatgacgataagtaaatagttgattttataaagcagtttcgttataatgaggtcatggttaaataaattaacgaggtgaactggacatggcgattcaagtaggtgatttagttcgcggccaatcaaacgaaattatgtctgcgacgtatatcggtaaggtcattgagaaatgtgaagaaactgtgcatatcttaatcttgaactatgcaccaactgatcgttttacggttcacgagttgatgcaacgaattctagtgaattcacaacaacttcgtacaatttcgttaacgaaataactccctaatacccatagatttctccctataaaaaaacgaccactcccaagaaaaggtcgttttttttatgcgcaaaaagcggtctaatcacaaaggtggcgcttgcatcttgttgctcgctcacttatagtgaaagataagtgatggcaggaggaatgtgcagtggttgaaaaaagaaagttaattgaaacagatcaaccagcattttatgaattagcacaatatgcgtttaataaaccggatagtgctaagcgccaagaattcttcaaacagttgtatacacatagtgcagggtttggcgtttttgatgacggccggttggcaagtggcttattagcgacgccgtttgacgtacggctcaatgggcaaacctttaagatgagtggcattggttatgtcgcgagttaccccgagtttgcgggcaaaggtgggattgcagcattgatgcaactcgcgtttgaacacatgcgtgcagaaggtgtgacgctttcgtatctcgcgccattttcatacggcttctatcgtcggtttggctatgaacaaacttttgatcagacgcactttgagattcaaacggctgacttaccacgattgaaatttgcaccgagtgcaggacaagtagtacggatgacattggcgcaagcggtgccgttgattgatgcgttcttcaatcagcatccggacaatcaagtcggtggtgtgcagcggactgattggtggtggcaatatgatgttatgaagcatagtgattgggaagtggcggtctatcgagaagatacaggacgggtcgcggggtatatgatttatacgcgccaaccagagacgtttgtgattcaagaactgatgacctcgacagttgcaagtcaagaacagctattgagctttattcttaagcatcagtcagcttatgcgataattcagtatgagagtgcactgactgagtcgctagctgatttattgcctgatcccacaatcgtaaagacgacaaccgtcccttatatgatggcacggattgtgtcactagctgatttcttcgcgcgttatgcctatcaagtagcggaactatctgcggtaacgattgcggttcaagatgatttcttacctgaaaatgccggtttatggcagttaagtattcatgcaggacaagctgctgtgacaaaattagcaacggggaccgcagacatcaccgttacgattcaaaatctaactaaggcgatgttggggtatcgcacacttgagagtcaagcacactttgggcatgtgcaagggacaccgcagcaaatcgctcaactcagtgctgcgtttagtcatacgaaaccgatgttatgggattatttctaaattgaacatcaaaaaaagccaatcatccaggtaatatctgaatggttggctttttttaattaagcaggttggacaatctgcacgttggcatttaagacaccggcagaggggatgtcacaatttggcattgcgacgtctaattgttgtgagttagaagcggcgaaggttccggtatcgttgacaacacggtaccatacttcaccggtacttaatgtgatcttgatttgtgagccgcgggggataacgcccaagtgcgcagcgactccggcgtacattccaccgggcatacttgttgcgccaaggaccgcgggatcgtaaaaggttaatttgaatgtccctttgtcaattaaggttggttcggcaggtgctggggccgcaactagttctggctcaggggcgggcgttggttccttaatttctgcggaatcaggatctggatgaatcggacagctaacgggtttgtctgttggtagaacagttgcgtgtttgaccagtgacatttcagctgcttgggcaggttgccccgtgaattgttcaatggcttcagatgacatcagcttttggacagggtggttcgtttctggtgctgcttcattggttaatgcggcacgcgcgatattcgttgtaattagcatcagcaatataaggccgatagctaacaagaatggtttgtttttgataataaagcgtcactcctaggtaagttttggaactaggagagtatatcaatgctgcatgtcaattaaatagcagtttctttacagaaatggggtaatttgtcatgttagtcatatgtttgtaaaatttagggacttaattaaagggcgtcacgatggcgttgatcggcagtaagacgcgaatgggaatgctatcatgacgattactgttaaaatgacaaaaaacagggcaactatcgtaaagatagttgccctgtttttaagaattagatgagaaaatagccgaatacccctaaaatgattaagaataagaagttcatgccagtgaaaacgacaaggaacttaccaaggtctttgccccagcctttcttaaatcgtttgtaagcaatcaagtttgcaagtgaggcaaacattgtgccgaccccaccgatattgatggctaagaacattgcgtggctgtggttagtgaagcttgaaagtaaaatttcagttgggacatttgcaatcaattgacaactgataatcccggtgatgtaagtttgttttgctgttccgacaattgatcgcatgaatgtggcaatcgttgggatgtgacttaaattcccaacagcgatgaagaaacagaagaatgtgagtaataagccgtaatcgactgttttgaataacttaggatcaaacgctagaatcgcgataatcactagaattggtgtcacccataatggaattaatgagaacactgcgaggaaaacgacaaccgttaatggaacgaaataccacagtggccctttttcaacttcaacgggatgtaacccgtgaagtttgatgggttcttttggaaagaggaaggtcgttgctgccaacataatgacgctgacaatcaagacgggaattgaatattcgaagaaatggcgaatcgtcatatggtaaaacgaaacaaggaaaatattatgcgggctcccaaacggtgttaatgaagaaccgaggttagccgaaatcgtgatgagcgtcaccggtaagattggtgaaaattcaagttgacgcgcaattaagatgaataacgggacgaacgttaataccgtcatatcgttggttaagaacatcgcgccgacaaacgttagtgctaataacatctgcatcaaggctcgtttggaacggcttttgataattaattcgcgagcgaagtaatcaagcacgtggagccgttgataaacttgaacgagcgtcataatacaaaagacgctgacgatcacgtggaaattaacgtaactaagttgtgggcggttgaaaaatgaggtgacaatggctgcgatggcagcggctaagagtagtttgtcatctaagaaaaaatctcggatgttcaaagcaatgtttttcatatagattcaattatccttcttaatatagttatattattcaaaaaagcactactacaattctagactgtttacggggataaaaacagaaaaatttacaatatatacacaatttttacaatacatagcctcccattctagtaaacgcggttgactgtctcgcttgacgttagcggtttttaatttgaagaattaagtgattttactgcttatcgcggctaaaattaggtataatataaatgaaatgtaaacgattaatcattattaagaaggtggagcagatgaaagacgccccaagacatacaatcatattaggaatagtggccacggtcattgcgtttatttgtggcatgttagttttaaagacgattttgaatttcaatttatggcttgcgattctaatcagtgcagtactaggcttatatgtcgggtttaatgcattctatagtacgtatttagcagaaatgatcaaaattgaagtggctaaccaaggattaacaagccaagacttagcgacaatgatgcatggtagggctaaggattatccaattgtccgcggtgaattgcgtctaatcatttctcggcgcaaacgcgcacagctgttagcgaagttgcgtgcacgggttagctaaggcttttgcatgaacgattgttctatgttaggataggactaacttattgaagggtgcgattacatgttaattgaacgaccattaattatgaagcttcgctctgtatatttgaagatgacgcatcgtgcagagcctaatattgattaaaagtcatctataggacattactggatttaacgactggtgacagtggtttatttgggtagtgactatggatggagtggtcgatagtcaatgattgtaatcatgacaggggtagcggatgctgcccctgttttttatttggaaagaaagtaggaataaaacaatgagtattttaaaagtcgaaggcctaacacaacagtttttagataaacaactttatgacgacgccgggtttcaagtgaataaaggcgaacatatggggattaccggccaaaacggggtgggtaagagtacgttaatcaatatcctcacgggcgtcattcttccggatgaagggaaagtgacgtggcaaaagaatcttaagattggttatctcgatcagtatgcgaagttagcaccaggattatcgatctttgaatttttgaagacggcttttgcggatttatataagaaagaaaaattaatgagtcaatattatgcggactacgcagagagccttgatgaccaattgctcgaaaaagcgggtgcgattcaagaactattagaggcaaaaagcttctatgatattgatacacgcgttatgcaagtcgccactggcttggggattgatgcattagggatggatcatgatgtatcacaactaagtggggggcaacgttcgaagattattttagcgaaactactattagaagaacccgatatgttattactggatgaaccaacgaactatttggacacgaaccacattgattggctgagtgattatctcaatcatttcgaaggcgcctttatcacaatctcccatgattatgactttttggaacgggtgacaacctgtatcgccgatatcgaattcggtaagattacgaagtataccggcacactacaacaagccttccggcaaaaggaagagaataaggctagttatttaaaggcctatgagaaccaacaaaagaagattgaaaaaacgaaagcttatatccgcaagtataaagcgggctcccgttcgacaattgccaagagtcgtgagaaacaattggcacatatggatattttgacgccaccaagtaatcgcgtgaaggctaacttccgctttccatatcatgcaacggccagtcagattctattgacgactaatgatttggagattggttacgatcgcgcgttactaccagcgttgaacttttcaattggtcgtgatcagaaggtggtcttgaaaggttttaatgggattgggaaatcaacgttgattaaaacgatcattaaagaaattccagcaatcgatggggactttgagattgccagtacggtgaagtttggttactttaaacaagacttgaagtggccgaataatatggtaacgccattacagtatctacaaggcgaataccctgatcagaaacaaaaggaactacgccaagttttatcgcggactggtttaactgccgaagaagcgatgaagcctttgaaacaacttagtggtggcgaacaatcgaaggtgaagattgccgaactactattaacatcaagcaactttcttctattagatgaaccaacgaaccatttagatgatgatacgaagaatgcactacgaaaagcaatccaagccttcgagggtggcgtactccttgttactcatgaagaagacttctatcaaggtgactggattgataagattttgaatgttgaatcactcattaaacaatagggataccgtagagctttgaagggttattggtaacgatgaaacgttgctggtaacttttcaaagcttttttaataaaaagcttgaccgcgcctgttaatcttggtaatatataaaagttgtctcgacgagggacgtatggttgatgactcagcgatacgaaataaaaaagattttaaaaaacgcttgttatttaaatcttatcgtgataatatattatatgttgcttacggagctataacttctaagtaataattaattaaaaatagttgttgacagacgatgttaatgtttaatcgttaaaaaactcgcaaccgaactacgctgcgaatgaaacgcattaatcatcccttcactacggtaccccatggcaatcccaccaatcaacagttcattttccggaatacctattgctttgcggaccgcatctggatacttggccgtttcataggcaggaattgtatcaacttgttcgttagccgcggctaacagaatcgactgactaaaagcccccatgtcataaatcatccatggcgaaactttgcgctcaaccgtcaagtaaataatgacgggcgcattgaacagatggcgttgtaaatcgctaaaattcgctaacccgtcttcgccaagataggcactgatttcatcattccacacgcgactgttctcagccattaacggtccccagtctgtccggtgaatcacgtttaaatcagagtagcctttcatccggtttcccgttcgttctaaatgatcggctaacgtttcacccgtcgctacatagactttccaaggttgtgaattcgtccacgacggtgttcgttgggcggacaccattattttttcgattaattcatccgagatcggtttgtttgggtcaaatgaccgaattgccttgcggtgattaaccacatcgttaaactccatgtgctttcctcctccaactaacacttatttagcgcgttaattacattttaataacgctcataataccagtgtgttggcgtttcacctaatcatttgattggactagaaagtcccaccaccggaaccgccaccaaaaccgcctgatgagccgcctgaaaagccgccagaaccaccactaacacttgttggattagcagcactgaccgcactgccaacactactattgagagctgttgtaaaggattgaccgatgttcaaccccccagtatacccgtagtaataataataacccagaggcattgtttgaagttgttccggcgtcaatcgaatcttcaaagctttaacgaccttatcagcaatcccgaaggccgttgcataacttaaataccgatcccacaatagtacatctgggacattcgccatatcgagtgtcgaaatatcctttagcatttgtttaaagccttgccattcgccccgtttttcgtaacccaattgcgtccatagttgcaaattaaatctacgccagacggttaaaatgaagacaagccccatcggaatgagcgtccaccaagcaactaagccaatcaaagcaccaaaaatcaaaattaaaaatagggcgccaaggccgattaaccaataattcaaactggtcattaactcagcgatgtgttctcgtaaccacccgctacgacttgcttcagtcgccactgctgtttgccacccatggtaatgttgattgaacagttttgcactatgccgttttggatatttctcaatctcaaatagactgacatgctgcccatcaccaatcacatcaaatagccagctaactaacttcttttctgaatgtgataactgattgcgattgacgagcgttaatgaaaattgcggcgtttttttatggaatagttccttctttggttcctgaacatcaattgttagattctttcgagcaactaagtctagaatcgttgcggataagctctccgcccctgctgtctccgtaattggtaatgccaacaactgacgcacaaccgcaggcccattttcatctggcaaatcatagacgtgttctggtgcctgtccagtataagtcatcacaggaagcgtttttcgaattttacgtaaaattaacaagaacatgccgggcgctaagaccactgctcctatagataaaagccaataacggcgtttttgtgctttgcgttcttgattagcttgttgcgccaaacgcgcttcttgtttgataatggctgcccgacgtgattgatcaatccgattcggattcgccgcagtcaccgccgttggaaaaataatatggctttcgacaaattggtttgctggattattagcgagtttaattgtaacccggcctttatcgggttcaacgacttgttgcccatctaaattgccgtgcgtccatgatttaaggtctgcttttttgaatgtggtaggtaattgtattaccacttgaacgttttgtaagtcactatcccacgcatcgccaatcactttccaattcaattccgccgtatcacgataattaataatcagattttgtaactgatatttcaaagtaaccgctaattgattgccatcttgtgcagtttggtatagtttgaaccgataattttgttgtgcatcagttaagctataggtgccttcagtacctgattcactttgactaaacggatgaccattaactgcgacttgcgggttaaccaacttctttggttgaccaacgtttgtttggagattctggttgatatagaccccatggatatcatcttggatatcaaacaccgttttttgttcgacctgagcactcccatcaggttgtacatcaacgtttacctgataacgactgatgtcataggtatcggcagcctggactggctggctaaaaataaaggtccaaaacgccgctattaagataaaaataccaaacttagttcgttttaaattcatagtttgccttcgttctgctcaaccttcgttaataaatcagggtcgaattgccccgctttgagcatcgcaatttcatacgcatatggtgcaaagttatgcttcttatcttcgccaacatatggggtttctagaattttaggcacattaacgagttgttcatgctgtaagacatggtttagcgcatcaaatccgatttcaccaaaaccaatattggcatgacgatctttgtgtgcgccttgtgggttcttagaatcgtttaaatgaacaacttttaagcggtccaaaccgataatgtgatcgaattcattcaaaacgccgtcaaaatcttcacgcacattatatccggcatcatttgtatgacaagtatcaaacgtcactgataacttttcattgtaagtcacgccatcgatcatctgtgcaagttctttaaatgaccgcccgacttcggttcctttacctgccatggtttctaaggcaatttgggcggtttgatcaggtcgtaaaatttcgtttaatcctttgataatttgttgaataccagcatctgcacccgccccaacgtgtgcacctggatgcaagacgatttgagtggcccctaatgcttcagcgcgtaacacttcttcttgtaaaaaagagaccgcaaacttgaagttctcaggcttcactgtattccctaaattaacgatgtatggtgcatgaacaacaattggacctaagttgtgagcttcaatatagggttttgctgcttcaatatttaattcttcgattggtttgcggcgcgtattttgtggcgcgccggtatatatcatgaaggcatttgcaccaaaatcaactgcactctccgctgaccctagtaacatctgcttgcccttcatactaacgtgactccctaataacattccactacctccatgcattttgattacctagattgtcacagaaagcgcaacaaaaagcaagacgaaacctaacccataaaaaaagcccgccattcaattgaatggcgggttatcttatttaatcttaggttcatagaaatgcccgagaattttgacagcttccgtcatgctgacgaatgcgtggtcatccgcttgtttcatgaccatttctaaatcatgcatttcaaagcgagaaataacggtaaataacatcgtcttttcttcacggttatatgccccttctacgtcgtggacaatcgtaatcccacgccgcatttcgtcttgaatcatttgaatcacaactttggacttatcggtaataatcatcacttgcagtttttgttggcgcgtataaaccatatcgatgactttgccgttgacaaaaatactcaagatactatagagcgcatgttcccaaccaaagaggaacccagcggcaaaaacgagcgccacattaaacatgatattgattgaaccgactgaacggccggtttttttgcgcagtacaatcccaatgatatctaagccaccagtggaaatatcgtttttcaaggccatcccggtcccaaaaccgttaattaccgccccaaaaatcgcacagataatcggattagccgttagctgtgtaaagggcataatctgtaccataacacttgaaaaaacaactgcaataaacgtataaatggtgaaatggtggccaattttgaaccacgcaagaataaataatggcacatttaacacgaataacatcaatgacgttgataatggaaatggtagaaacggcataaatttcgacgtcactgtatgaatgaattgcgcgaacccggtaatcccagaggcgtaaatgccaccttcttcccagaaaaagttcaatgcaatcgacacacaaattccgtataaaatggctgccgaaatcttcgccatattttgatgtttccgagctaaatcgtccacttgaatatcacacctatccacttttgatgtctttcattctagcataccatttgtgaatactaaaggatttcttggaattaatgcgcccaattttcacgaatgaaagcacggcgtgtcccctcgaccaattctgctctaaatggttcttttttatagaaatcttggtgatattcttcggctggatagaacggtttggcagcctcaatttgcgtgacaatcggttcgttgaagcgaccactatcgattaatgcttgtttggaagcttccgcgattgcacgttgctcaggcgagttaacgaaaatcaccggccggtaactatcgccacgatcttggaactgccccatggcatcggttggatctgtttggcgccaataaatttcaactaattccgcataagaaataatcgcgggatcaaatgtaatttcaactgcttcagtgtgccccgtcgtatgcgagcaaacttcctcataagttggattaggaacatgcccaccggtataaccagaaacaaccttgataatccccggttgctgatcaaacggatgaaccatgcaccaaaaacacccaccggcaaaaattgctgtatcagttgccattattgtgccccctcttcaaataagcttagatattgaccgtaaccttcattttcgagttgttcgactggaataaattttaaagctgctgagttgatgcaatagcgtaatccaccagcttcttgcggtccatcattaaaaacgtgccctaaatgcgaattagcttcttcactacggacttcaacgcgttccatcccataagattggtcccggcgttccgtcaaaggcgcaattggctttgtaaatgagggccaaccacagcctgcatcatatttatctaacgaactaaataatggttcatgactgacaacatccacgtagatgccttgttcatcaaaatcatcatactcgccggtaaatggggcctccgtcgcattttgttgggttaccgcatattgttctgtcgttaaccgttgttctaaatcatctgtcatatccatcactccttcgtgtttattattataagcagatacaaacagatagcgacaaatatgctcagagtgttctgacagtctgggatttcctgaggattaaagcgaagggacgaataagcgcacagcgcttgtttggcacttcgaattaaccggagggaaatggctgtcagaacacatttagagtgttctagcagtctaggatttcctgaggattaaagtgaattgactgccatcaaataaaaaagatgcctcaaatttacttttgaggcatcttatatgcgttaattttgatttaactgttgttgcactgctttaaagtcagcatagacttcagcaagtggtaccgtaatttcaacaccactagtcatgtctttaacatgtgctgtttgatcagctaattctgattcaccgattgtaatcaccatttgggcgtttaacttattagctgttttaaattgcgcttttggtttacgatcaagatagtctcgatcagcggttaaacctgtatcacgaatcttttcaacgatttggagagttgtcgcacttgtttcagcgccaattccaacgacatacacatcgagtttagattctggaaccaacgcttcgttttgcgcattcatcaataataataatcgttcaacgcctaagccaaaaccaacccctggcatgtccgggccaccaagttgttcaactaacccattataacggccaccggctaagacggttgtgtagccgcgaccaagcaccttattatttgtcataatttcaaaaattgtgtgattgtaataatcgagtccgcgcaccatttcagtatccacttcatatggaatgtgcaatgtttcaagtaagtgcttaaccgtttcaaagtgcgccgttgcttctggtgttaagtaatccaaaataacaggtgcatccttcacaatttcttggtccttagcatctttactatctaagacgcgcaatgggttcttgtgtagacgaactttagaatcgtcacttaattcatcaaaatgtggttcaagatagctgacaagggcttcatgataagccgcgcgactttccgcatcccctaaggtattgatggccagttttaaatccgtaatatggcattcacgtaataaacgcatcgccatgctaatgacttcaatatcgaccgctggactctcagaaccaaatgcttcgaccccaatttgatggaactggcgttgccggcctgattgtggccgttcataacggaacattggtcccatgtaatacaccttataaggtttttgatgttctggcccataaagtttattttctacgaacgcccgtacaactccagctgtgccctctggacgcagcgcgatatgccgatcccctttatccatgaaatcatacatttctttgctgacaatatcagatgtatcgcctgaactccgtgaaaagacatcatagctttcaaataatggtgttctaatttcgttgaattgatagcgggcaaaaacgtcgcgtgccgttttctccactaattgccactggtttgaatctccaggtaaaatatccgcagttccttttggcttttgatagcccatgatcattcctccaaatggataccaaataaaaaaacacccctgtcgttgaacaagggtgcttaaatgcacggtaccaccttaattttagcttaattatataacgttgttgccaacggtgtgcgaccacacagacctcaaaagcagtctcggcgtgccattgatttcttgcagctgtgaaatcatctctgtcgtagggggcttagcctttactttatcactggtcatcacttattcttattgttataagattaacgttatttcaaaaaaaagtcaatcaatcttgaattttttgtaactttttcgctgaaactctttagaaagttgagttttttgctataattaaccttataaattaataaaacataacaaaggtgttgaaaaaaatgcagaaacctttgagctggtttaaacactatccggccgttattatattagcattactcgtttttgtcggtctctttgtgacccacgcgctggctgcttaccaacaaattacgattaaagcgaacgtcgtaaacattcgccaaggccctggattatcttatgatgtcatgagtcaagccaataaaggcgaaacaatgaatgttatctcacaaaagaataattggtaccaagtgcgcttaagtggtgataagattggctgggttgctagctggttagtcgataacaccgaagtcagtgccacttcaaaccgagtcgctaaggtcaccaacagttttgccaatgtccgccaaagcagtagtgccgatagtcaactactcggtaagttaaatcaaggtgacgaaattacagtcttataccaacaaaacggttggagccagattaaatacaactcagcagttggttgggtacaaagtgatttaatcgaagtttccgaccaagctccggcgactgttcaaaaaatgacaaccgctgaatctgagtctacggatactgatacaagtagctccgcgattaaatcagtgacaacccaactggataataccaagctacgcactggtcctgatgtttcgtatcaatatacccaaagctacccggccaataccaagctaacttatatcaataagagtggtacttggtatcaagttaaagatgccgatggtaataccggttacgtcgcaagttgggttgtcactccttctgagaagaatgaagttgttaagactagcgctacttccctttctgaagccaccattgttttagatgctggtcatggtggcaccgacgtcggtgcactttcaactaagtctaagtatgaaaaagactacacattagcgaccgtcgatgcgattgctaaaaaattaaaagcggctggtgctaacgtcgtgctaacgcgttcaaacgatagttttgtcgatctcgaaccgcgacctgctcttgccaataaattaaaggctgatgcctttatcagcgttcattttgattcaagcaatgaagccaatgaagcatccgggacaacaacctactactattcaagcagtaaggatatgagcctcgcgaaggccatcaacaatcagactaagacattaccgcttaacaatcgcggcattgaatacggcaattatcaagtccttcgcgataatcaacggcctgctgttctcttagaacttggctacatcaattctgataaagactttagttatattagcagtgctaattaccaagctaaagtcgctgatgccgtttataccggcttaaccgactatttcaaataactaaaaaagaactgtcagattaaatctgacggttcttttttacataattggggcaaacaaacgcgctaagtcctgtgaccaacgttcttgattgctttgctcttgtatccgttgtttcgtaaatggtaagcagtcttttaaatcagccgtaaaagattgttcaagttcagttgcgagttgtgcatcatataaaaaagcggtcgtttcaaaattcaatctaaaactgcgaatatctaaattagccgtcccaaccgctgctagttgcccatcaactaacattacgcgtgatttaaatccggttgattcagagaagtaaatctgaccgcccgccttcacgatttgtctagcgtaatacaaactcgcatgatgaatcattttatgttttgcacgtttggccatcatgatcttcacagtcaccccagaattaatggctaacactaacgccgccaatacagaatcatccggaataaaatatggggtctgaatccacagccgttttttagcggcagcaatcatcttcaaaaagcctaacttaatctcatcgagttctcgatcaggtccacttgataccagttgcatgctagtctgcccgtgttcatctgagttaggaaaatattgcggactgtaatacaccttttcctgacgcgtagccgcattccagtccatgaaaaagcgagcttgaaacgataacacaccatcgccggtaatccgaatccgcgtatctcgtgcaggaatattaacgtgatgattattctggttaaaatcgccaaggtaggcggtattgccatcaattactgccaattgccggtggttacgaaagttaaagcgtagattaacgaaccggaaccgagaactaaaaaacgggacaacttggccgccggctgcttccaatggcttaaagaactgccgggataaatgttgcgacccaaatgcatcatacatcacacgcacttttaccccccgcagtgccttgtaagccaatagattgaccagttgacgcccgtgttcgttgtcataaaaagcatagtattcaagatggatatgatcttgcgcccgattgacatccgttaacaactgttgatacgccgccttcaaatccgttaaaattgttacattgttttcctgggtcacaaccgcggtatttgatactaagaagaggttgattaagctctgcgtttctggcggtaacgtgtgttgcttctgcgcttggcgtaacgctgctttttgggaggtcaccaaggcatcaatgccgagccgttcttgtgttttcaaatcgaccatatgatcttccggtaatttttttccgaaaaatagatacaaaacaaagccgataattggtaagaaaatcaataccaagagccaggcccaggttgctgcaatatcacgttgttggcgaaatacggtggtaacagccccgattgtatttgcaatccaaatcagtgctatcccccagataatgattgctgtcattcttcattcatcctattctttaaaccactttgcttttaatttggctagcgtaccatttgcttgtaagacccgataacgtcggttgataaattgacgtaattgttgatcttgcggacgcatcccaacagcaaactgttctgctgcaaaaggactgtcgatggcttgaaaatcgctgccattgtggcgtgacttaatttcaaattgcgcgtagacttcatcaattaagagccccttaatccgatcggcctgtaagtcgataaacgcattgttataagtatcatataggattggtgcatggttggcaattctttgctgtaatcgtttaggataacgctctagttgttccatcccagatgagcccgtttgaacgcctaatggttggttggttaaatcagccatttgattaacagggtgtttcttgagcgacacaatcatttgccgattagtcagatacgggtcactaaacgcaacccgttttgcccgttgcgccgttttagaataaccactccaaattaaatcaatcgtttgattattcaattccgtttctttcatatcccaatcaatcgactgaaagtcaacccgaatgccactccccttaaaaatcgcccgtgccaaatcaacatcaaaaccggttaattgaccattcttctcacggtaagtcattggcacaaaactatcatcaatcccgacgactattttttggcgtttttgaatcgttgcccattgatcagcctgctgattgcgttgtgcgcaccctgctaaaccaatcatgctcatcaataaagccgctattaatgctgtttttttaagcttcatcattttgttgaaccccgtttggttgtaattcaaagatttgatcagcaatctggttggcaaattgaatatcatgggtgacaacaatttgtgtcattccctgctgtttcaaatctaaaatgagttgtgcgacacttgccactaacgatggatcaagtgcactggttggttcgtcataacagagaatctccggttgcatcgccaatgcgcgggcaattgcgactcgttgacgttgaccgcctgatagttggaacggataagccgtcgcctgagcacttaaccctagttgctgtaataattctgcgccatctgctttagcctttttagcgggttgttttttgaccatgatgggtgccagcgtcacattctcaaggacagagagatgtgggaataaccgaaaatcttggaagacaacgccaatgcgcgccccttgttcccgattactaggttcgtaaggtttaccatcaataataaaccgtccgctatcgggttgatcaagcccactcattaaccgtaataaagttgatttgccagcaccacttggaccgacaatcgctaaaatactccctgattcaactaataaatttaagtcgttcaaaatttgccgacctttgaaggattgattgatattttctaattgaaacatgttgccgcctccttagcgataataacgataatagcgttccaaacgccgtaatgcccatgtacaaatggctgttaacaataaataaataatcccgactagcaaaagtggtaagagattgacatcacgcgcacttgcgacattgccagcccgcagtaaatccccaatgccgataacatacactaacgatgaatctttaatcaagttgatcacttcgttaccgacagacggtaagacaattttaaccgtttgggacacgataattttagcgattgtttgtgggtaagttaagcctaagacctcagctgcttcgatctgaccattatcaacggcttgaaagccgcctcggaaaatttcggcaaaatatgcagcataattcaaaataaaagcgattaaagcagcatcgaaccggttaaaaacaattccgaccacgggtaaaccataaaatacaaaaattagttgtaataataacggtgtcccacgcatcagccacacatataaatctaaaagataatgcagtggtttaaacttagctaataaccctaaacttaataataaaccaagtggaatcgcgccaataatcgttaggccaaaaacagccaacgtcatctgcgccccacttaataatgctggtaaaatcgataaactatagtcaatcatgacagactcctctcatttgtccaaaataaaaagccctctttgcgtttaaaacacaaagagggctaaatttcgcggtgccacctcaaatttttgtttgcctcacaacaaacaactcagttagttttagaccaataaaaaagtcccctggatttctccaagaggacgaatttatcgcggtgccacctcagtttaataaactgctcacgcagcttaaacttatgtagtttctaaaactacagcgataacgggctaacggatcatctttattcgatgatcaaactcacggttgtgccattaatctcaagggccgacttccaccacgcatcagctctctgaacctcaagaattaatttggaccgttcaacgtttaatgtattgttattcattctattcaatatcgcatcaaaagtcaatggttaatgtttattgcttaccgaaaagacgggcccagaaaccaaccttgtgttgtttcaaagtcatcaatggaactgtttcgcctagtaaacgacgggcaatattccgatagccttggcttgctgggtttttcggatccatcacaattggttcgccggcattggacgtcttgataaccgcatcatcatcaaaaataatgcctaacaatgaaattgaaagatgtttggtaatttcatcaacatccatcgtttcgccttcattcatcatatgacgccgaatccggttaattactaagcgtggcgcaatccgcatttcttcttcttctagcaagccgacaacgcggtcagcatcactaacagaagaaatttcgggagttgcaaccacaattgcaccgtctgcaccggcaatcgcatttttaaagccagattcaatcccagcaggacaatcaagaatcacaaaatcgaattcttcttttaattcattcacgatggcggtgacttcatcaggcgttaacgcttctttatccgcattttgagcggctggcaataagtaaattttttcatcaaaacgtttatctttaatcagtgcttggtgcaacttagcacggccttgggcgacatccacgatatcataaataatgcggttgctcaatcctaagacaacatctaaattacgcagaccaatgtctaaatctaacaagcaaaccttcttatctaaaagcgcaagcgccgtcccaatattggcgcttgatgttgttttaccaacgccgcctttaccggatgtaataaccaaagctgttcccatttttattgctccttcattttacgatataattttggattaatctgtttcaaatccgttaactcaccgtagtcgataacatgtaaatcattgatgaaacttacactctgtgccgtaaatggcgtcttctggtgatcgagaatctcaactgcgtctgctatccgcaattgtaacgcgtgtgataaatcacctgcaacaactgcttctgcattatctggaaaaccagcgtgcacaatcccggcaacttcaccaagtacgaagatactgcccgttgcttttaacattgcgccttggtgtaaattaccgacgaataagacatcgccaacataattgacctcttggccgcttcgtaaaacattgggttcaacgtgaatactattttcccgccgatcaatctcagcctgttcaatcgtcatgacttccgattgaatgcttgtcacattaaattctggaaactgctcaaagacggtcgccagtgcttgcttttgcgcatcattcaacaagcgtctaccagtggtcagctccagttcaatctgattgctccccaactgcggttgctctaagcgaatcttattcaataattccgctagtgcaactaatgcttgatcgaaatccgcacccgcatcaatgtttaattcaaaaccttctttgcgtcctcgtaacgtgactgcatccatagaaaaatcaaaccccttaccgttctgattttaattttagcaataaatattttaaaggcaaatacaaaaagacaaaataaaccaaatttaatgcaattgtcggtgctaaaacattactaataaattcgactggtgttactgttgcataaccaatcaagcgattcatgatgtaaatcgtactctcgagtaatgttaaacacaagacatcgattagcccaatgaaaaaggctgagtcaggtaaatattgttttaaataacgcactgtatagataatgagcggcaccgcaaaagtgtacatcccgatcatccccgtataatacaaatcgtataaaagaccaatccctgctgcataccacgtaagttggcgttcctctggtaaaacaaaggccgttaccactaacacgagcataaatagccggctaatcaacgtatgatctggtgtatataaccattgttcacataaatgactgatggcgccatccaaataaaacgcaacgagtaagtagattggtaataaatagcgccgttgtaatcgcgtcacacccatgctactcaccttcaatcgttcgtttgatgacagtcacaacggttaagttgtttaaatcagcagctggggtcacataaacagttaatgctaacccaaaatcgtctttcttaactgctgctaccttaccaaggtacaagcctttaggggttaatccacctaaaccagacgtgattactttgtcacctttttcgattgccgcatcggtcttaatctgcccgagcttcaattgtttccggtcagcattgtaaccggacatgatcccattaacttgcttaccatctttggtattcaccacagcagcaaatccgttactactttgatccgtacttgaaacgagttcaaccttcgaattagtcttgttgacttcaacaatccgtccaataatcccagactcagacatgacgggcatatcttttttaagtccagctaaggcccctttattgataaccaatgcattttgccaattatcaggattccgggataaaacagacgcattaacggttgtataatccgtcaaggtgccttttaagccgagttcctttttcaaacttgcattttcttctttgagggtttgggtttgaaccttggtttgagctaaatcatcaagttgtgctttaagttctttgttttcctggtacgtattaatcaagtctgttaaggcatctacccctcgaccaatcccattggccggcacgctaatgacttggttagtgatgcccgttacgtcgttgccaaattggcgtacgaaactcggactctttttgttattgcgtaaaccaactgacattgcgatgaagcccatgcagacgattagcatgattaataacacaattaacttcttatttgaaaaaaacttttgcatggtttcttcgccaccatccatccttaatatcgtaaaggtgggacaaaaaccggtgatcagtagtccttcctatagcaatcgattcacaacccgaatctgtcactaatttaggcgctacgtcaacgctgaccgcttcttgtcccacttctactgaacgattaatttttcttcataacatcgatattctttaatgattcgccagttccgactgcaacacagtctaaaggatcttgagcgataaagactggcactttagtagcatctgaaatcacttctggtaagtgtttcaacaatgcgccgccaccagttaagacaatcccgtgatcaatcacgtcggctgcaatttctggtgatgtttcttcaagtgtttctttgatggcttcgataatggctgtgacaacttctttgatggcttcagcaatatcaacagcttgaatgtccactgtcttaggtagcccagttactaaatcgcgaccacgaatgctcatcgcttcaatttccttagcgcgttctggtgatgctgaagcgatttggaatttgatttgttcggctgttctttcaccaatcaacaagttattgttttgacggatgtaagaaatgatcgcgtcatctaacttgtcgccagccattcgaattgaacggcttgaaacaatcccacctaatgagattgtggcaacgtctgttgtcccgccaccgatatcaacgaccatgctaccagttggatccatcacaggaagaccggcaccaattgcagctgcaaatggttcttcaatgacgtatgcatcacgagcgcctgccaccttagttgcatcgattacagcacgtttttcaacttcagtcacaccacttggtacgcagaccattacaaatggcttgctagatgagcgacctaatgatttttcgataaaatatttaagcatggcagcagttgtatcgtaatctgcgatcacgccatctttcattgggcgaattgccacaatactaccaggtgtccggccaatcatgtcgcgggcttctgagccaacagcaatcacgtcaccagtttgtgtatttttagcgacaacagagggttctctcaagacaatgtctttaccgtccatgtatacgagtgtgtttgcggtacctaagtcaataccgatatttctagtccctaatccgaacactatttttctctccttcagttaccaaacgtttttatagtcattggcattatatcataattttacgtaataaaaaacgcaatgtaactactatgttaacggattttcagaaaatttgacaggtctcgcctaaaattaacagattcttaaagaaaaaagcgttctcttttactccactaagtaaccctcttctcgcaaactgagatactgctggcttccaataatcaagtggtctaggcatacaatgcccatcagttcaccacaggcgacaattcgtttagtgaaggcaatatcttgcgttgacggcgtcaactggccgcttggatgattatgcaccaaaataaattttgctgcagaataacggaccgctaatttaaagacttcccgcggatgcgcaactgaactatcgagtgtgccaatataaatctgtttcatctgaataatttgatttttaacgtctaaaaaaacagctagcagttgttcttgcgtttcgcccgctagtgtttcaatcatgcgacggccaaccatttggctcgatgcgaccacaccaaaccggagagttcgttgcgtttgcaatcggtgactcaattcacagatggcttggatttcaatcgctttgactggtccaattcctgccagtgtttccaactgcgttaaacttgcttgttctaaatcccgaaagtcaggataatgcgctagcaatttgcgcgccacctcaccaacagataggtgactattaccagaacgcaaaatgacgattgccaattgctcgttcgataaacttgctgcgccgtactgcattaattgttctcttggttgtaattgtcctgtattccccgccattgtttgcctcccacaaaaaaagacgcatgacgcgtcttcttggtttaactaacaatacgttaattaacgggcttatttttctaaatacggaatcacttgagccaaatccccaacggtcgcaagtgtttgctgattggttatcgcagttggttcaattaaatcagggaccataatcaccggaatggcagctttactagcggccatcacaccattaggtgagtcttctaatactagggcactaggcgctggtaaggctaatctatccaacgcttttaaaaagatttcggggttcggtttgccgtgagtcacttcgtctcccgcaacaatttgactaaaccgtgattgtaggccagtactttgcataaagtcatcgaccatgctgcggaaattgctcgatgcaatcacccgactaatcccctgattatcacagtaatctagtaaatcgactaaccctggcttaattgcaacaccatctgcttcaacaaccgttgctacgttacggtatgaacgatcaataaattctgttgcggccgttgccgaacccagcttcgctttaaaataattgcgtaaatacgtatcagtggtccctaagatggcatggtgatcttcaggtgtaaaatcaaagcccatttctttagcggcccgaatattggcttggtaataaatcttctccgaatcaaccaatagaccgtccatatcaaaaataattcctctagttgtcattgactattctcctttaaaatattggcgaatcgtactaattaaatatagcgaacccgttacgagtaatacatcatcagccgacacatccgctaataattcggttaatgcaaccggccagtccggttcaaatgtaatcgtctcatcaactgctgcatattgggccgctgttgccgcgcgtggattatcaggaaccgtagtcagcaccatccgcgtcgctatttttttgagctgtggtaacatctcatctagatttttatcaccaagcgctccgaataacaggtaaatgtcacgatttttaaattgatgccgcgttgtctgaaccaattgcgccaccccttccggattatgtgcaccatccaagataattaacggctcatcgttgattttttcgaagcgcccaggccagttaacccgttttaaagcacgtttgatgtctcgaacctctagtttttgttgcgtcaactgtaagtaacaccaaaatacttgtaatgcaaccgcggcgttttcaatttgataatcccccatcagcggaatctgtaattgtcgatacgttaccgcgtcattttggaaagttaactgttgcccccaagtaggtaacgttttgaccgcagcactcgaaaaatcacagccactaatggctaacgaactattcaaacgagttgccgtttcctcaaccaccgtcagtgcttcttttggtaattgaccaatcacgactggatgaccagccttaatgatcccggctttttgagtcgcaatttctgcaaatgtcttgcctaatagagcctgatgatcaagaccaatcgacgtaataactgatatcagcggcgtcaacacattagtcgagtcatacaaaccgccaattccgacttccacaacggcgacatcaacctgctgttgtttgaaatatagaaacatcattgctgtgatccattcaaactcggtcacctcaaattcggggtcagttgtttgaatctgggcaaccgttgtctgaatttgttgcgtaacagttactaaatcggcatcactgattggttcctgattgatagcaattcgctcgttgaaccgcataataaacggcgatgtgtaacgaccgacttttaaacctaactcttcaatcaaacaactgaccattttgacaacggatcccttgccattagtgccagtcacatgaatgaattgttggttttcttgcggattaccgagacctgccaacaattgcgtcattcggttcaggttcgcttctttatgtaatctggggcgcgaatgaatatacgccaaagctgtttcgtaatctgtcactaacatcgccaatctcctttaacaaactgtctctattttagcatagattgcacgcgaatcgatgcttaaaaactggcgcacacaaaaagaccacctcagtttttaaggtggccttaacgtgcttttggttgcaacaacttccgcttaatctaaaaattccgttaatcctaaaacctgaattaacggaatttttgtattgatgctcagttgctacccgcaaccaatcacacttctttcactaacgtgctcctcgagcagccttttccggttaactgcaaaatgggcatcatggcaaaaaacgccacaatgcccattttactgttaatcctcaaagcctaaccagctcgagtcgcacttcttttttaacgtgttttcatcaacagcttcctgtgctttgctacacttatcaaatcggcgcttacagcgccaattcgctaagttaggcaaatgctcagaagctaaccgttgatgatgcacttatgcattttttaattctgctactcgtttttcgactgattggtattgttgttcgtagtctgcttgtttgtcgcgttcttcttggaccactttttctggtgcgcggtctgtgaagcccttgtttgacaacttgcctttagcacgtttgatttcaccgtctaaacgtttcaattcgccttctaaacgggcgatttcttcgtctaagtcgagcaattcagccaatggcacataaacttctgcaccactgataatggctgtcttcgccaatgctggtgctgttagaccttcagcaatttcaagtgacttaggatgtacgaagcgttcgatgaagtcttggttttgtttgaagatcctcattaatggcgcatcttgaatgttgaccaagacatcaattggcttgcttagtggtgcattggcttcggaacggatattccggacacttctaattagatcgattaacgcgttcatttgcgttgttgcttctggatcgtctaattcagcgtgcacttctggataagccgcattgacgattgaattgccagtatgtggcatactttgccagatttcttccgtgacaaatggcatcactgggtgtaatagacgcaatgtttggtctaaaacataagccaagttataacgtttattggcaatggctgcttggtcgtctccgtaaaggacttccttcgccatttcaatataccagtcacagaaatcgttccagataaagttatacaatgtccggcccgcttcaccaaattcgaagctttcataaagccgtgtaacatctgccaccgtttggttcaattggcttaagatccatttgtccgttaaatcaaggttagcggcatctggcatcttcgttggcgctggtgtgtcttcaaggttcatgatgacgaaacgacttgcgttccaaatcttattgatgaagttccaggcagcatccatcttcgtgtaactgaaacgaacatcttggcctggtgttgagccactcgttaagaaccaacgcaatgcatcggcaccgtatttttcaatgacttccattgggtcaatcccattaccaagtgatttactcatcttacggccttgttcatcgcggattaaaccgtgaatgaggacgtgttcgaatgggcgttgttctgtaaattcgagactttggaaaatcatccgtgagacccagaagaagatgatatcgtagccagttaccaacgtattggttgggaagtagcgtttgaagtcaggcgcttcagtgtttggccaacccattgttgaaaatggccataaggcactactgaaccatgtgtctaggacatcagaatcttgagtccagttttcgatatcttttggtgcttcttcgccgacatacatttcaccagtttgtttatggtaccaagttgggatttgatgcccccaccataattgacgcgaaataacccaatcatgaacgttttccatccattgtgtgaaggtattttcgaatcgttctggcacaaagttcaccttttgatcggttgcttggttcttcaaagccatttcagcaagtggcttcatcttaacaaaccattgcgttgaaagccgggcttcaacttgtacaccagtccgttcagaatgaccaacactatgtgtcattgggtcgactttaatcaaataaccttgttccttcaagtcagcaacaatcgctttacgtgcttcaaaacgatccatgccgttatacttgccggcactttcattcatgctggcatcttcgttcatgacattgatccgtggtaagtcatgccgattaccgacttcaaaatcgttagggtcgtgtgctggtgtaatcttcaaagcaccagtaccgaaatccttatcgacatagtgatcagcgataatcggaatttcacgattcattaatggtaatgtgaccgtcttgccaacaaggtccgcataccgttcatcatctggatgtacagcgatagcagtatcaccaggtaatgtttcaggacgtgttgtggcaatttcgatgctcccagaaccatccgtcaatggatagttaacatgatagaaggccccttcatcatcttgatgcaacacttcgatatctgataaagccgtccgtgcttttggatcccaattgatgatgtattcgccacgatagattaagcccttgttgtataaggtaacaaagactttacgaacagcgtctgataagccatcgtctaatgtgaaccgttcacgtgaataatcaagtgataagcccatcttagcccattgtgcgtggatggttgcggcatattcatctttccagtcccagacttgttcgatgaatttttcacgacctaagtcataacgtgaaatcccttgttcagctaattttgcttccactttagcttgagttgcaatcccggcatgatccatccctggcaaccagagtacatcatacccttgcatccgtttttgccggattaacatatcttgtaaggtcgtatcccaggcatggcctaaatggagtttacccgtaacatttggcggtggaataacgattgaataaggtttggcatctggattggcatttggcttgaataaatcagcatctaaccaatcttgataacgaccggcttcaacttgatttggatcatatttggttgacatttctttgtgatcagtcatcttgttcactcctttaaaatattgcgtttaatggcaaacaaaaaagcattcctcacaataggacgaatgctttttcgcggtaccacctaaattaggactagactagtccccaactcatgatttgttaacgaacgaaattgtccggttagccctacttaatttcaggttaacagctcacaagctaccgattaattggtcattggaagacgtctcagccatgcatcttctctctaaactagcccaatcttaatcgctcttgttcaacgcgttgttaatagtttagctgagtgaacgccaaaggtcaagcgtcaccggcgttcattctgaaaataaatcccgaatcttctccccaaaaaaatcctgagaacaacatactgttattctcaggatttttatagtttacaatagttcagcaatgatttcttcgtcttgatttaagaattgatcgccagctttgatttctgtcactctaattccagcaattgagcgttcaatcaaggcatccacatcgatgcgttgttcgtagaaccgggtcttatctaagttaggccgggtcttcggtgctggtggtgcaaaaatggtacagcaatcttcgaatggcatgattgataattcgtacgtatcaatatccttcgcaatttcaatgatttcattcttatccattgtcgcaactggccgcacgattggcgttgttgtgacatcattgatagccatcatactttcaagtgtttgtgaggccacttgaccgacagattccccattaaaaatggctaaaccttggcgcttagcacggatttgatccgttaaacgcaacatcatccgccgttgaatggtcattaagtaaccttctggcacagaatgcttcacttcttcttgaatttccgtgaatgggacttcgataaacttaatcccaccaacgtatggcaccaatttcgccgttaattctttggccttattcaaggcattgtcgcttgtgtatggtgggctaaagaaatgcaccatttcaatgtcgacaccccgtttgagcgttaagtaacctgctactggtgaatcaatcccaccagataacatcaacattcctttaccggcagaaccgactggtaagccaccagccccttgaatcacttggttggttaagtaaatcgcatcttggcgaatttcaacccgcaaagtaatgtcaggttttttcatttgcacttctaattcaggtaattcatctgataagtaaccacctaattcgcggttcatatcattcgtatccaagaagaaattgtgatcagaacgacgtgtgttaactttgaaagacatcccaggtttgccgatttctttcatcatggcaagcgccatttctttaacagaatctaaatcacgatcaacttggatacttggtgagaagttttggatgccgaagacgtgacggagacgttcgataacgccttctgcatcgtcgccgtttaaaacgatatgcatccggtcacgtttagggtgaatccggagttgtttatactcgtgaagcgcctttgtgacgttcccgtttaaccgaccgataaaatcgttccggtttttaccctttgtcgaaagttcgccgtagcgaaccataatttcagtgtattgcatgcctatctccttttagatggtagtttacgaattaatttttttgaagcgttcgttaatttgatcgaatgctttgatgaatgcatccgcttcttctagcgtattgtattcatcgagggatacccgaatggcgcttgtcgcaattttttcattgacgtgcattgcctttaaggtactagattcagtccctttcttcgaagagcaagcacttgtcgttgaaatatagatttcgtgttcttcaaacgcatgaaccgttgtttcaccgcgaacacctttaattgcgaagcacaaaatatgcggcgcaaaatcaggcgtcagttgtgaaaacataaccgttttatccgattgactgacatggttaaagagtcgttctcgaatagctgcttggcggtgtactttttcagtctcatcggtcaataacaaacgtaaggctttggccattgccgcgatggctggcacattttcggttccagaacgtaaatcatgctcttggcccccaccggttaaaagcggcgctaaatgacgcccgcgtttcttatacaaaatcccagtcccccgtgggccgtggaatttatgccctgataaggtcacaaaatcaacgcgttcgttgaaaatcgcctcttgaatgcctttgccaatcccttgaacggcatcaacgtggaaatgaatattaggataatccttcaaaatatcagcaatggcttcaagtggctgacacgttccgatttcgttattaatggccatgatcgaaactaaaatggtatcaggccgcaatgctgcttttaagtcagccggatcaattcgaccaaactgatcaacgggtagataagtcacatcaaagcctaatttttccagttgctgcatggatttaatgatggctggatgttcaaccgatgtcgtaattaaatgtttcccaaacgcccgtttttcaattgccgtgccttttaagacccagttatcgccttctgttccaccgctggtaaagaagatttcatcgtggtctacgcctaataaatcagcgatttgttggcgtgattgttctaaaatatgaaaggctttttccccaatcacatgtaaactagaggggttgccgaagaactgttcactaaccgcttgataggtctgaagtgcgcctggcgcgattttagtggtggcactattgtcaaaataaatcatatcgatccttcttactaaaaattagtgttttaacgttgtacattatagcaaattggttattaaagacaaccaattaatctttaacaaaacaaatccgagacaaaatgcgtcttgtctcggactggtgagcatctaagtgactaattagttgcgtctgacttttggtcgtaataggccttttcaacttgtgtgtaagcacctggatcaaccttttcaagggccgttgccaataagtcgacagctttagcatagtcgtattcttcattaaaaatggtttggaccgtcacacaggcttcctggatggcgggaaaatctgcacgatatcggttggcatattgtaacaattgctccgtaatcaatgcactgtcaattaaggtatccgtcttggccttcaattcatctaaatcctcttgaacgagaattaattgcttcgcgatatcgtctaaattaatcttaatttgattcaaatcatgatcaagtttttgaatctcatcagaaacaacgaagaagaaatccaaatatttctgttgtaaaccaggtaaattaaccttttcaacagcgcgcttcaagttacgtagttcaagttcaaactggcgtaagttttcattagcgacgacttcgccttgatgcaaactagcaacctgatcatgaattgcttgttgtttttcttcgatgacagttagccgttcgtcaatcccggtcaaatcttcagcaatcgccgtgtaaaccgcttcgtggttggcaatcttcgcttggtgcccttcaactaacgcctgttcttcaccaatttgcttttgtaattgtttggcgcttgccaactcaccatgtgtgagtgcataactctgattgagatgatcgagttccaataatagctcatggttctgacgttcagcatgttgcacgaatgtcgcggtggttggcaattgcgtcgcgactgccttcttggcagtcatctcagcttctaattgatcatataattgatcaatgccacgtgcaatttcatcgttattggcttcaaccgactcaatggccaaatcacttaacaaggtagtgctcttatcaagttgatccattagttgttgttgtttgacttcaatctgccgatcatcaaattgataatgttcttttaacatttgatggtaggtatcattaatttcaaccagttgttcgggaaactcgttagctaattcgttatagcgctttggaatccgtcccatctggtcttctaattgcgttgtttcagtaattaatttctgcaaaatggccttagcccctagatggtcgccggctgttgttagttcgttggcttcgtcaaaatccacctctaagcgacctagcgttgcttcaagcgcatctaatgcaggtccaaacgaaaaactcttagtcaacaaacgtttacgtagttgttgatattgttctcgtagacgctgaattttttgacgtgtatcggcttcattggcaagtagattttctaaagcatcttgaacatccagtaaatcttgatccgtttcagtcaagtacgcccgcaattgtttgagaatccgtgcaacctgaatgaattggtatttggcattggccgtttccgcatcaaaaagatagccttcaatcgtgctgaagttatggttggtaatctgctcatattgtttttcccaacgatcaaagttttgcaaactttcgcccgtcaaatgtaacgaccgtaacttcgttaagcgttccggaatcggcaacgccattaagtcgcctttatgtgcttctagttgtttaatttgtttgataaaataacgttgataaaaaacaacacttaggtagccaatcagtgcgacgactacgattccaatgagaatgtaaaacattcaaagacacacccttttacaatttaaatcagatttattagtccgttcatccacttcaattcattaaactatgtttgattatagcatgaataagataacggttcagcaataattagcgataaactttagaaaagctgcaattttaatctgaatttgcttgacgttgccgcacaccgtacgctatactagccattgtgtaaaataatgcagcagtaaacggtaaagccgtcaacagttcatttgcccagagttttggttcaattgtgtaaccttgcggctgcaaaggtgaagattgttaataagtgaactgaacgattactaagtttacatcggattattttactccaaaacatttattggaggatttttttatgtcacgttatacaggtccaaagtggaaactttcacgtcgtttaggaatttcactatcaggcacaggtaaagaacttgctcgtcgcccttacgctccaggccaacacggtaacgaccgtcgcggtaagatttcagaatatggtatgcaattgagcgaaaaacaaaaacttcgtttaatgtatggtttaacagaacgccaattccggaacttatttgctcgcgctggtaaaatccgcgaaggcaagcatggtgttaacttgatgatcttgctagaacaacgtttagacaacattgtttatcgtttaggtttagcaagcactcgtgcacaagctcgtcaattagtaaaccatggtcacgtaactgtcgatggcaaacgtgttgatattccttcatacgaagtaaaacctggtcaagaaatttcaatccgtgaaaaatctaagaaccttgtaatcgttaaggatgcaatcgaaggtacagttggtcgcccttcattcgttagctttgatgctgacacaatgaaaggttcacttgttcgtttaccagaacgttcagaattagaaccagaaatcgacgaagccttaatcgttgaattctacaacagataagcagttatctgttcaattaaaagagtcagacttaggtctggctctttttttgcgcatttaaagacgcgtgcctacttagcacacgcgtctgatttaatctatttagtctgtaccaactcatataaaggcaccatcttcatcaaggtcgtttgaatatcggccatgagagcttcgggttggtcgaataatgggttgtctttcagataaacttttccgaggagccactccccttttttggtcttagcaaacttatcttgaatcagtttcaagttctccgatgacattgggaatttttgcttggtcatgtgatcgtagcttaaatcatagtcggcaaagtcccttaagaggctttctgtttggcttgccaataacggtgcgtaatccgtcttatctggcatctcagccattaaagcaaaccaaacgaagatccgatcatcccaaaaaccgacttcaaagtgcggcatcatcttatacccgcgtgagctctcactaagtgccatccaagtattcattggtggatttttgaagcggcgtaaatgcttggcaatatgcaacgagaattcgcgttttgtttctgctacgagttctgcttgcaattgcgcaccaaatacttcaaactttggatcaagttgcgtataaatcttgtctaaccggccctttaaggtttggtcatcaaaaatatcaaaatcagcacgtgtaaacatctttttcctccaacatggtatacttaggtttaattctaatatagcacaattcagaaatgaggcgactattttgtcagataatgatcaattacaacaacacttggatagtgccatgcacggcgcaccacaaaccaatcccgatgaacgccgccgctacctcggctcattacgtgaacgcgtcttcttaggcattactaaccaggaactcgccactgcgcaagctaaattcgaagcgcatcttacggattataagccctattccgtcttattaaacggcaagaaccccgctgctaccgattatttagcggccctttcagcacacgggattccgttcacgctcgttaacaacgaaacagccaaaaccgaaccaacggccttcggtttgttagtggttgccaaagacgcgattaaccatgaggcaattacgctcgatacactataccctgatccaaaaaccgcaacgcaagatgcacccaccaaaaaaggtggtttcttaaaacatcttttcgattaacactaaaaaggcccgcacagtttaacttgtgcgggcctttttgcattactttagtcggtttcaatcgctaattctgggaaaagtaattgtaagacagtcattgaaacgcgccgcgcttgacccatcattgggaacaagtgcatcaacatcgctggattgtagtttgcttctagcacaaccgccatctcagggtgttccggatcatatggttggtataagtttggcacaatgatatcgattcccgtgatactgaggttcaaaatttcagcaacctgttcagcaatcgcaaagtaactttgatccatctcatcggtcacgtcaaccgaatcaccaccatttgagacgttggaattttgtagtaagaagacctgtgaaccacgcaatggcacatcttcagggcggtaaccttgttgtttcaacatgagcaattcccgttcaccgaggcgaatgttttgcaacggtgtcaggtgcgcttcgccgcgtaatgggttgtcatttttcttagcaacaagttgggcgattgttgaacgaccatcccccacgacattggctggaatccgttctaaaacagcctggaccttatgattcatcactaagaaacggtattccgaacccgcaatgaattcttcaactaaaatttgctgatcgtacgtttgtgccagtttaaaagcagcaatgaagtccgcttcacttggacgcgttaaaaatgtgctaatgcccgcccccatgttactgtgttttggtttaatgacaatcgcgcgctgaccaaacgccgcttgataatctgctactgccgtctctaaagcggtatattcggcacccgctggcacccgtataacatgacttgccaataaaattttagtcactaccttattatccactaacggcccactaattagccgatctaaactcgttatattcccatttttgactaattcatgatgatgttgataggtcagctcaataaattgttcatcgcgatccaaaacagccacatgcagccctttttggaaagcgtcaaacatcagcatttgtgttgataattccatatccgtgtatccctgtaactgatagggagtctctgtcagctcacatttaaaacgttttgcctgtttgagggcaaatgcctttagcgagtcctcttcaatcgcttgtgttaagcgataacttaaggtttgtcgatggtcctgaacacgctcattcatcactgtccaagcttgtttaaaacgctcattcagatgataatccgtaatgaattgggccaaatcggccatcacagtcttcaattgtgtttggagctgcgatggccgcagcggattctctaatgctactgtgtcatttaactgacgacccgtctgaatctgagtggctaaatcaccggataatttcggcaaggataataagtacataaagaataagtgtaagaagtctagctgttgttgatcaatccccgtcgcagtatacgggttaatatcaaacccccgaaattctaaataatccacaccagtctctaacatctgatccaatgagtgactccgtaaccgcacagttccgtaaaattcgcgttctgaaattaagtcgccattagcaatcgcttggcgcattgaatcaacatatgcggcaactgaatcaaaatgaattaataattgcttattgctgtagccgaataattcactcgagcgtaaactccgtacagggtgttctggtaatttcgtcatatcttctaaaaagcctggttccgctatcggactcgcaccaaataaatacgttaaaacatagtgataacgcacgtaattttgcgcaatctggatgtacaacgcatcgctaaaatcttttagactcacatagtgatcatgatagtattcatcaaataaacgcacaattaacgtcgatgacaggctaaaattataatggatgccagagaccatctgtagacgtcgaccgtagcgcttcgtcaaatagtcacgataggcctttaccgccggtgtgtattctgaaattggaatggttaattcatcgtctggtaacaacggtggcatactgaggggccaaatatattccgaatcggccatacttgattgcaatacttgttcgagcgctaataattgttgttggacatctacggtctgttcgaaggtatccgtaaccagttccgtttgcatctctgcaaaatcagtcgcaatgtatggatgaaacgttcgcgatcctaactcactggggtgcggttgttgactcaatgcgcccaatccggtcactcgctgcccctctttttcgaccccaaaagcaccttggttcaataaaggtgttaagcgtaattgtttaatgttctcaaataattgattaggcattttgaaacctcttcttaattcagtcttatacaactcattatacacatccctaaaaccttttaaaacgataatcactacgaatttgcgcgacatgttatactaggaacaacctaaacattaaaggatgaacgctatgcaacaacctctcgcatttcgcatgcgtccgactaacatcgatgaagttgtcggtcagacgcacttagtggggccgcaaaaaatcattcgccgaatggttgatgccaaactcctctcatcaatgattctctacggaccgcctggtactggtaaaacgagtatcgctagtgccatcgccggtagtacccagtacgcttttcgcatgctgaatgctgccactgatagtaaaaaagatttacagattgtcgctgaagaagccaaaatgagtggcaccgtgattttactcctcgatgaaattcaccgcttggataaaaccaaacaggattttctcttaccacatctagaaagtggccgcattatcttaattggtgcaactaccgaaaatccatatatcagtatcaaccctgccattcggagtcgggcccaaatttttgaagtcaagcccctcactgaagccgacattcatgtcgccattcaacgggcactgacagataaagaaaaaggcttaggtgcactagccatcaatctcgatgaaacggctgaacaataccttgcccgcgtcacaaacggtgatttacggagtgctttaaacgccctcgaactcgctgctcgttcaacaccagcgaatccagacaccaacgtcatcgacatcgatattgacgttattgaagaatgcgtgcagaaaaaagccattactcatgataaagatggcgatgcccattacgatgtcatctccgcctttcaaaaatcagtccgtggcagtgacgttgatgctgcgctccattatatgggccgtttgattgaagccggtgatttaatgtcgattagtcggcgcttgatgacaatggcctacgaagatatcggcctcgccaaccctcaagcctgtgcccgtacagtcgaggcaattgctgcggctaaacaacttggttttcccgaagcccggattccactggccgtagcagtgattgatctctgcttatctccaaaatcaaattcggccatcaccgcaattgataacgcgttagctgatattcgcgctggaaaagccggtgaagtccccgatcatctccgtgatgcccattatgcaggggctgaaaaacttggccacggtgtcgactacaaatatcctcataattatcccaacgactgggtcgcgcaagattacctaccagataagctcttaggtagtcattattacgaagcaaaagcaactggtaaatacgagcaagtcctcaaacaacagctagaacgcttgcgccaagccagtccgcataagtgaacggttacaaaagtgttgtgttaacatcacgagcgtgctactataatagtaggatttctaaggtgtgcgcgtcttcccaccttatgttgaccgatcaagtaattcgttaatgggacggatgagttattagcgagtgtagactttttcgcgaaggaaccaagtctaataataatctgacccacctgcattttctagcgggctcaactatcgggaagcatctacggcaccactagatttcccaaagtccaacgactttgaccgggctaacgtttacgttggcccttttttgttgattattttaggaggttgcacattgattcaaatcgccataatcgtttttttaatcattatcgccctacttggtgcgattttatgttactaccaagacaagaagttcctactctttgatttaactgaaaaccggtatttaggtcgattgatgtacttttcagggattgcgctcatcggtgtagcaatctgcggggctttgatttactggctattgccactagtctggacattggtgacgctcgttgctgccagtttaatcgccggcttagtcggccttagctttgcaactaacctttaagatttacttttgacactgaactagcgtacaataaagatgtaaaattaaatgaggtgatgacaatgttacaacaatacaagcacattttggtcgcaatcgatggttcttatgaagctgaactcgctttccgtaaagcagttgaagttgcccttcggaataacggacaactccacttgattcacgttatcgatacccgcgccttccaaaatatctctagttttgattccgcaatggttgaacaagtcacagaaacagctaagaaaacaatggacgaatacatcgtgactgccaatgaacttggcttaaaagatgttgactatagcattgaatatggcgcaccaaagagtttaattgcccgcgaagtacccgaaaagaaaaatatcgatctcatcatgattggtgcaactggtttaaacgctgttgaacgtctcttgattggttctgtaacggaatacgttactcggaccgccgtttgcgacgtgctcgttgtgcggacagatttagataataaacacgcactcaacaagaaacgcagtagcattggtcacgaagaagcataaattagcaatcaaaaagccgggacgcttatgtcccggctttttttagtggttaaccacttattcagccaattgttgatcaacttgcacaatgatctctggatgatgccggattaacgccaatgttttagcaaccgttaaatcctgtaaggcgttctctcgatgaagcgcatgttctgcacgaccaagaatgaaatacaatgcatcaagtaagtaaagactttgcttatcgattgcttcgtcaatcgcaagctgagcgtacttaatcgcaccttcataatccttcaattcaaaaagaattcccgctaagtgattataaatctgcaactcaacttggaaatcggccatagcaagtggatcagaattctccaacatttcaacggcttgttctgcataaatccgtacacgctctaaagcgcccttcatcaaataggacttgctaatgccgataatacatagaataccgtaaacatccgtctgagaaacaacgtattgattgaaggcacgattgaaaaagaaaagtgcatcgtccggtttattctccagcaataacttaatttgaccttggaaataataataccgtttgtaatcatctgctttgaccagtcgatctgtgtagatctgctgaatcaaatcacgtgcttttttgaattcattggtaaataacaatgcttgcacacgactcaacaagacgtgtaattgatcatcttcttgcacaatcactgagtccaacgtaatttcaagccgcttacaaatttccaagagaatctttgtgcttggcacctgttcttttttctcaattaagctaattgttgcttgcgtacaaattcccttagctaactccgcttgagacatcccccgtgctttacggatttgttttagtttatcccctaatattctcattttaaatactccaattacatcattatttaatttaaaattaatttccggaaaatataacccaattaagtaatttacatcaattagcaatgacgctactagttgcgtttattatacactatgaactagttatgtggcattacttatttttttatccaataagtattttacactacatactaaacattaccaaacatttatctttaattaattgttaaggtgctgttcgatagtacgacaaaaaaacggcttcctgcagcggaagccgttttttataacgttgctaatattgccggaacttcttttaatgattcaatttgataatccgctgccgattgatcaatcgcgaaaagtggatcaaatggttttaatgcgatgacggttaaaccagccgccttccccgcttgaatccccagtgcagagtcttcaatcgcaaccgcctcggttggttctaaatgcattcttttaagcgcttctagatacacatctggtgctggtttattatgcgcaatctctgcaccactaacaaccgtttcaaaataaggttctaacgcggtttccaacaacatttgttgaataattccgcgctcaccagcggacgccaaaccgatttgatatgtcggtgcaacggttgctaataacggttgcgcgtctgggttcatgatatttttaaaaacgattggatgagccgctttatacgacgtatagccgtttttaattgccgctcgttccaaaacagtatggtttggaaacaactgttttaaaacggcattcatattggaaccaatttgtttacgactttcctctgccgttagtcgtgcgccaattgcattcaaaaatgctaagcgttgttcaaaatagtacggttcactatccactaaaacgccatcgacgtcaaaaataatcccttttactgtcatcttctctcaatcctatctggttaattaaaataaatctgaaatcttccgtaagtaatccgcaattttatcaggtaattcaggttgtagcaacaatgactgtaaaaagcgattgcggttataccaccgattccaaaaaccaacggtatcctgtggtgccatagtcaacaatgaacgctgccactcctgtaagacgattaaacaataatcgacatagagttgatgcttgttcattaaactgattagaacgttcgtcagatgactatcttcaccatatgcgagtgcgttatcagagaagcgatacgcctgtagtacaattgccatcatcaaaatcttatccgcacgttggatttcaggtgtttcgttaagttctgaccagacattgatgatatgcgtcatcgcatgcgcccagcctttaccatcaacgtatcctcgtgaatctaattcgatgactgtataagccattactcgccgttcaattgccaataattcggccgtacttaatacatgataaaaagtgcggttagcatataaaatcccggccaaaaacatcgcgctaaacgaacgtaaaaaaacagcgtcattttcaggttctaaaatatgcgcgaataaataatcatcttgcaataagcggtccttgacccaaatcaattgggctggggttaaaaccgtctgccgtaataatcgattgaataagtaaaaaacacctttatcgcgcacttgcgaatctgggcttgcaagatgccttaataaatcatcgagctcttcatcgctgatggtcgcttctttgcctttggttttaattcgctcatcaattgctgtgattcgttgcaagactgactcgttgtcctcaggtactacgacatgtgtccgccgcgtcttatattggacgccatccatgacgaccaatactttttccggaattgattgatagatgtcccctttaatcaatgcactacgaatcgcgtctaactgttgcatcacattttgaacttccttcatcaatcatcacccactctctactgaaaacatctcataactaactattataatgcattcggccacagacataaactatcaatccttaaacaggcccacgatatgacaaaatcatcacctcgcttagaataaattccacctttagactgaatcaatgtaacttctagcttgatacgattaagacatcaattcacaaggagtgtcaatcatgaaaaaaatcattctattactgttctcacttggactaattgttatcggcggtccaattatcggatcagccacaactcagaatatgacggacggcaatgaccttgcccaacagtgggaccggttcaacctcttaatttccagagaagccgtctatgttaaaacagcacaccaatacgggacacaacaagcacatggcgattacctttaccggcaacctgcttaccgtgctgatggcagtcattacgaagtcgttttccaagcgccgcgcgcactaaaacctaatcactacttaaaattagatgccaaggggtgcttcgtcaattcttggactgccgtttcaaaatctgaattgcccgttaaactgcagtctagtctataattgtaaaatacaatcgaactaaatgctgttaattgcgaaatacaaacgagggatttcgcttttttcattgcttacatttaataagtatgctatattattcgcatgcactgataaaaacgatttcacaagggagtaatgaacatgacagaattattcgatttacaacaaacacgccggacaatttatgcacttggcaaaaacgtttcaatgagcgaagctgaattatcagaattaatcttcaacaccattaaagaaacaccaactgcttttaacgcccaaggttcacgcgccattattctctttggaaaagcaaatgaaacactttggaacgatattacagcaactgccttaaaaccattaacacctgcggaaaacttcccaagtacacaagctaaattggcttcattcgccgctggtgtcgggacaatcttgttctttgaagatcaagacgttgttaagaatcttcaagaaaacgtgccattatatgccgaaaacttcccaacatggtcagaacaagcttcaggcatggcacaatatgccacttggttagccctcgcagaaaaaaatgtgggcgctagcttgcaacattataacccagtaattgatgaagccgttactgcaaaatggaacattccatcaaactggaaacttcgtgcgcaaatgccatttggttcaatcgaaaatccagccgatgctaaagactacaataccgatgcaagtcgtttccaaacctacacaaactaattttaaaccgaatcgaccagagtgcgcatgcactctggttttttattttacccaacaaaaaaagcgactcgcatccgcgaaccgctttttactttaaggagaatgagagattcgaactctcgcgtgggcagaacccacctgacggttttcaagaccgttcccttcagccagacttgggtaattctccatatcaaatcttacaacgtttattataatatcaagttcgctaatcactgtcaagcctgttttttaaaaataactactatttacacccgtccaccaactcggtatcataaaggggtgcatttaaaatcaagtaaaactacttggactggttcggaaacttcccagaataaaaaactaaggatctcaaggaggttagaaataaatgcaaactcgcaaaatcattatcgattgcgatccaggcatcgatgacacgctcgctttgaatttggccattcaatcgccagcggtggaagtcgttgcaatcaccattgtttgcggcaacgttcccgtccaaatcggcgtggacaatgcctttaagtgtcttgaacgtctcgggcggctcgacattcccgtttatgttggtgcggataaaccgctccataaaccatttgtcagtgcgcaggatacgcatggcatggatggtttaggtgacagccatatcccgcgcctatccactattcaaccggcacaacaatccgccgctgattttttagcagccacttttagtcaaccgagcgatatcagtattatcgcactcggaccattgaccaatattgcgactgcgctccagcggaatccagatttaggtcggcactgtgcccgctttgtttcaatgggtgggacctataagagtcacggtaactgctcacccgttgctgaattcaactactggagcgatccggatgccgcactgttggtattcgaccaactcgatcaaaagattgaaatggttggcttagacgtgacccgcgaaattgtcttcacgccaacattgctggcttattgtcagcgtgtcaatcctgaagtcggcgactatctaaaagccatcacccagttttattttgattttcattggcaatatgaacacattatcggctgtgtgatcaatgatccattagcagtcgcctattttatcgatccaaccctttgtcacggctttgaaagttataccaccgtcgaaacaaccggcatcagcattggccaaacactggttgaccggttcgatttctggcaccgtcctgccaatagcctcatcttaactaaggtggacaccaatcgtttctttgaacagtttttgaccgtcgttttaaatgcacaagcaaccctcattaaaacggacttaccaaaacttagataaggaacctattatgcgaaaatttaaaacacaacacttaaccattctggcacttgccattgcactcaattacgtaggcgctaacattgccctatttttacggttaccaatctatctcgatagcgtcggcaccattttagccagcaccctattaggtcctctggcaggcgcattaactgccacttgcagtagcatcatcagcggtgtcacgaccgacttatttgcgctttattacttgccagacggtctattaaccggcttactcgctggatggttcttataccaccaccaacggacgaaacgcgagttaccccttgttgctttaggtgtcgccattcccggcacaattgtcagttcattaattacttacttcttgttccacggtatcacctcttcagggtcaagtttaattgtacaactactaagcggcttgggactaaatcagtttgtcagcattacactagttcaagccggtacggattatctggaccggctcttggcaatcattgtggtgacacaggtttgcgtccacctcaaacaaaaaatcaagacactctaatcaattaaaaaaaagcaagtgtgcttctaacatcaattagaaacgcatttgctttttttagttttgcatcagtaacgtgacatactgttctagataatctcggtcgacctcatcgtaagcgccaacgacgcggttatcaagatccaaaacaccgattagttgattagccttgatcattggcacaacaatctcagaacgtgcagccgaatcacaagcgatataattctgatgttgcgccgtgtcttctacaattaacgttgtttgctttgcggcggcttcaccacacacccctttacctagtgcaatgtgcatacacgagacgtttccttgaaatgggcctaaaatcagctcagcatcttgatacagataataacccgcaaaaacagtctccggtaatatttgatttaataacgccgaagaatttgctagattagcaattaaattcgtttcacctgccagcaaagcagcttgttgttttaagagcatttcgtaagcctcgactttagcttcttttgatttaaacatcacaatcacttcctcttttcaagctattatagtggaagcttgctgcgttagcaattcaaaacatcccttaatttcgacattaaaaaaaccgcacatcggcgatttttttaatgaaaaattgttttatttcttcgataaactgtctctggttcgccctcttcatgattgacgtaccgcgcaatcgcgtataaataatcagagagccgattcaagaaagttaatacagcttcgttaatcggttctacttcctgcaaggcgacgacttggcattcaacacgccgcgcaattgtccgacaatattgtagtttcgctgctgatggtactcccccaggtaaaataaattcttttaaagcaggtggaacatctgcatactgatcaatcttagcttctaaccatttcgtgtatgcgttgtctgtccgatacccccgcgaatcatccggcgtcgctaaatctgtcccacagtcaaacagaatttgttgaatctcaaccaattccattctcaatgccggataatcaggtaaatcactgatgacgacacctaagtatgaatttaactcatcaacacccccgtatgcttccacacgaattgcgtttttgcgcactttttgaccgccgataattctggttaatcccttgtcaccggtctttgtatatagtttcaatccgtagcctcctaaaactgtcatccactatcaattttagtgtaccacgtttgaaagcgaatttttggcgttgcttaatttttaacacttgtctgcttgtatcaatttaagtaatgcctcaattcgacggtacgaaacatcacatgtatcgccatttgcaaatatcacttgatgcgtctccttatcaatccgtacgactttgtccggattcactaggatactcttatgggctctgaaaaattgtggcaattgcgcttgaatcgtcacgattttccctacaaattcacttaaccgatgatcactgtgtaagaagacgtgccgtgctttatgcgctgtttcgaaataattaatctcttgaattgccactttttcaaacgataatccatcatcatattcaaaataagctggttcttcagctaacggcacctgttgttgtcgtaacttaatggcatcgttaatggttgcttgaatatctgcgcgaacctgcgccaacccgcgatccttcaaaataaaattcaaaacattaattcggcgttgaatggtttccattaaaagttcgtcatgcgttgaaacgaacgcaatctgtgcatatggatccaattcacgaattttaagcgccaattccatcccatccagcacgtcattctctaaatcaatatcaagaaagtaaacgcccccttgcgtttgactttcttgtaaaaaaattaataggtcatagccattcttagtcttcaaacgcacctgagcatccaatgtattttgttgaatatatgccgttataatctcttcataactatctagtaaaacctgtttatcatcacataaaaaaatatcaaccatgggtctcctcctgttcaacaacaagcattgcaacgaaatagtctccatcttgttttaacattaagctaaaatctgagcgcatatccgtgatttctttagcagttgtgagcccaagcccgcgattaatccccttcgttgaataaccagcctgataaagctgaccaaattctactggtgtattaatcatatttttgacacaatagaccatcttacccttttgctcgaataaactgacactgattgaaccatctttaatatcatttaccgcgtcaattgcattatccaaaaagattcccagaatccgtaattcatcaaaatactgttgttgttgcttaaataaatccggttgaacctctaaattaaagggaatccgattattatgtgcttcaatatacttgctaaaaataatgcctttaatataagcattattaatctcttgaaaccgtccaattgcctgatcttgaatcgtgtcaaagctataatgcgttagtaaatcatgaaaatcctgcattaaaactgggctcccttgttcattgataattgtctctaaagccaataaagcattggcgatatcgtggcgaaacttgcgtatttcacggtagttacgctctaactgttcaacatacagcgttagatttcgctgactttcttgttctacgttgattctattttggcgaatcacagctttcgtatacaaaagcattcccacaatcaccaaaactaatagtaatagcacaagtcctaacacaaggtacaaatattcaaccggcagattcgcatgcttaaagctatcaaaaagcaccatcactgccaccacaaataacgcgagaccggctaaaatcgtgccggccacgcacataccgtatgaagcaatggatgctttaataagctgatctaaccgttggacaattaatcctaatccggctgcaatcaataattgactcaacataattaaacacaccatttgccaattaaactggctactcatcagattatcaaggccctttaagtgagtatacccaattaaccccaccgttgttagaaccgatgatagcatcacgatgatgtaactaaagatggttgcgataattaacgcataacttgtctttaatttacgcagatttttaaagccatttaaccaaccatataatccaacagttgccaaaatcagccatagctcttcaagaaaatttccaattaataaatccattccctgaacaaaagcaatgccgactccaactgataatagtagttgaaatctgttcgttcgtttcaacttccccgtcaaaaataatactaatagtagaaacgaactaaacgtacttagattaatgacaatctgcattgccagcggcattttcattgccatgcataaaactccctactcgaaccttaattccaaaaccagaaaattaaattttgaatgttactcatcattatcatacccctcctttcatattatgaatacccatgattggtgactcatttcgattttatcacgtaatttttttaaaaggattaaatgtcataaacgtatacttgtctgcattaaacgtatataattaatcataaatatagataaataattactatttggaggctaaaaatgtttttaggccaattgatccatcaacagcgactcaacaagcaactgacacagtctgaattagcagcggggatttgcacgcaaaatacaatcagcaaaattgaaaagaaaaatctgccccccacaatcccaattctaattaagatttgtacacggcttggattgacattaaatgaacttttcaccgaatttaacgcgctcgacactgccagtgacgaaggcgtgatttctgcggaagttgctttattagcaggcgattctggccctgctgccgcattaattaccgatatcgacttcaaggcaaccgaacatccttatcccgccatcttcttctttttcaatggctatttaagttaccttgaccatcaatctgaattacagattttttccgcttataactcgttcacagcggccatcggtgacgacacttcaacgttgaagttacttctaaataccggtatgggtttaatttaccaagaagctggcgaggaattagctgatttttatttcaataataatatcaatttcatcaaccaacttgatcacatcaatgtcattgatgttcaacgcgtcctatttgcttcgcgtcacacagcagcctatatgattaaccaacaccgcattgatgcagctatcgagtttttgacgaaagccctcaaactgagtcaaaaaaatcaaatcatcaaacaagtcgatcatttgtattacctccgtgctcgggcgcgccaacaaagcggtcgagactatgcagaagatcgcgaaaccgcgttagtttttgccaaataccttaaaaataacgcgttaatcgctaaaattaaagcgttactggatacaaaaatattaataaaaaatgcggaagtagttcagtggtagaacatcaccttgccatggtgggggtcgcgggttcgaatcccgtcttccgctttttttgtacccgtaataaaatagtttccgggaagtagctcagcttggtagagcactacgttcgggacgtaggggtcgcaagttcaaatcttgttttcccgactctcaaagacttgttgatgacaagtctttttttgtgcgtccaattgattagctactaaaagtcagtaaactttcattttgtactgataatcgttataataatagtcaacgttagtcaaagttaaacttttgacactgaaaaacgcagaagactaaatgaaggggctgatatgtttgcaaagtcagaacatctcggatattattgaagcctatctaaaaaagatactggctgacaatgaacaaatcgaaattagacgctccgaaattgctaagctttttaattgtgtgccgtcccaaattaactatgtgattaatacgcggttcactgagcagcgcggttatgtcgtgaatagtaagcgtggcggcggtggttatattcggatcgtcaaggttcaatttctcgatgatcgggactttttagaagcgttaattgaaaatgttgatacgcagatttcccaggcggacaccttagccattatccagaaactatatgatgaacaaattctttcgcaaaaggaaggcaatttgatactcgcggcaacgagtccacagacattagcggttaataataaacaattagaagagcagcttcgagcacagattctagttgcagtgttagaacgactacgatatgaaattaagtaaagagtgggggattatccatgaataatctatttacaccaagtgcaaaaaacgtcttaatgatggcacaagaacaagcaaagaaatttaatcaccatgcactaggaacggaacatctcctattagcaatcgtattagaaaatgagggaattgctgggactaccttacgcgaattaggtgtcaattcgaccgatgtccttgaagaaattgaacgcttaaccggatatggcgatgctgtaatcgcttctggcattggcggttatttaccatattcgcccaaagccaaacaagtactcgatattgctcgggttgaagcgcaacaagctaattcggttaaaattggcacagcacacctattattagcacttttacgtgatgatgatattatcgctgcgcggatcttattgaacttaggacttagtttagctaaaacacgccaactactacttcaaaagatgggtgtggatacggcaaccgctaaaaaacgggctaaagcagctaagaataatgccgatcaagctgggacaccaacgttgaaccaattagcgcgcgatttaacacaacttgctcgtgacaatcaaattgatccggtcgtgggtcgtgatgaagaagttcggcgacttgtgcagattttagcccggcgttcgaagaataatcccgtcttagttggtgaacctggtgtcggtaagacagcgattgctgaaggttttgcgcaacgcatcgtcaatggcgatgtgccaagtgacatgcagcaaaagcggctcatgatgctcgacatggggtcattggttgctgggacaaagtatcgtggtgaattcgaagatcgtttgaagaagattatcgatgaaatctatgcagatgggcaagtgattctctttattgatgaattacacaccctcattggtgcaggtggcgctgaaggggcaattgatgcttctaatctcttgaaaccagcattagcgcgtggtgaattacaattaattggtgcgacgactttagatgaatatcaaaagtacattgaaaaagatgcagctttagagcggcgattcgcgaccgtcacggtcaatgaaccaacgccagaagatgcggaacaaattttaaagggattacgtccacgttatgaagctcatcatgggattgcaatttcagatgaagctttacatgaagcggttgtcttatcaaatcgctacatcacgaaccgattcttaccggataaggcaatcgatttaatggatgaagcgacggctaaggtgcgcttggatgctgttaaccagaagacaccgtcggataaattagaacaaaaactacaaactttaaatgacgataaagaagccgctgttcgcgcgcaagattttgaaaaagcggcgacgattcatgagcaagaagtaaccactaaggccaagattgccaagttacaagctgccgaacaagaaaacggtgttcgcagtgacattcaagtgactgctgaagacatcgctcaagtggttgcgcaatggaccggtgtgcctgttactcagttgcaacgcaaagaaagcgaacgtctcatgcaacttgaaaaagtcttgcataaacgggttgttggccaagaagaagccatttctgccgtttcacgtgcgattcgtcgtgcgcgcagtggtttgaaagatccaaaacgaccaattggttcatttatgttcttaggcccaaccggggttgggaaaacagagttagccaaagcattggcggaagccatgtttggttctgaagacaacttgattcgggttgatatgtctgaatatatggaacgttacagcacgagccgtttagttggggcggcccctggctatgtcggctacgaagaaggcggccaattaacagaaaaggtccgcaataaaccatattccgtcattttatttgatgaagttgaaaaggcccaccctgatatcttcaatatcttgttgcaagtcttggatgacggctatttaaccgattcaaaaggacgtaaggttgatttccgtaatacgatcatgattatgacatcaaacttaggtgcgacagccttacgtgatgataaatccgttgggttcggggttaaagatgtaactgctgattataaagcaatgcaagggcgcattatggaagaattgaagaaagctttccgtccagaattcttaaaccgaattgacgaaacggttgtcttccattccttaacacaacctgaattgcgcgaaatcgtgaagattatggcgaagaatgtcttgggccgtttagcggaacaagggattcaaatcaagatgacagctgcagcgatggatgttgttgccaaagctgggttcgatcctgaatatggggcacgaccaattcgacgggcgctacaaacccaagtagaagatcagttgagtgaagcgttgcttgctggcgagattacgatgggtgtaccggtgacaattggcgcaactaaaggtaaaattaccattaccagtaagactgataaagtaactgtttaaacgtaaataaggtgtcagaccaattggtctgacaccttatttttttgccctaaaagggtcgtgagctgttcaatttcagttttaatcgcagcgccgatattcgtttgactgacacgttgacgttgactaacttgatcaatcactcgacgcgtggaaataatgtcttgcatcttggcaattgcattggctcgtgtggtgaacggctgatgggtgactaactgcattccatacgaattgtacaggagcgtaaagccaccaatgccagttgtgtggtgataagcttttgaaaagccgccatcaatcacgatcattttgcgattagccatgattggattgtggccttttttgacaggtgtgtgaccattgagaatgtgccccgtttctggcgttaagccaaactccaacaagagtttctcaatgaagtcttcctgatggcggagttggtaatatgcgttcttcttttcttcgtgtaaaacggggtcggcgctgaagtagcgttcgaaggtcgtcatcgcgttcttgccaaatagtggggagagcggtcctgtccacaggtaccagagtaaatcggtggataaattatcttgattgagcgggtggtcgaagctcattcgaatttggtgatcgaagaagtcgagtaatgatttaccagcgtattgtcggttagcgagggttaacgtgaggaagttgccggcttcatcaactggaatacagccgtgaaaaaggagattctggttgtagagttggtacatgttaccgttgtcgattaaaaaacggagatgcttgcgtagtttttggcagtgggtaaacgtgtttagcaatgatgtaacaatggctgcttcatcggaagttaatatttcggggtgtgtggggtcgattgtttgaaagcaggtgttatcaagtgggtagtcatgaccatttagatgaattgtctgctgttcaaagtcaacatggctgaggattaagcggtggtccattttgaaatcaggattgcgtttaatcacggtttgttccaacttaaactgcatgatggcgatggcttggtgcacttggttgatgcttttcttttcagctgttgagattgcgggttgattggcagcaacctttggttcgaaggcgggattgggctgataagttcgttgggcaaactgaaccagttcgctaaggtcaattccgtaagctttctcgatgatggctaaattattgtagcgtgcgcaaatgcgtaaaaggttgagcatacatagttgagaaccgctagcggcgccgaaccagagaatatcatgattgccccactgaatatcaaccgcagggagcttggtgagttgttcgacaatcagatcgggacgcggcccacgatcgtaaatgtcaccgatgatatgccaatgatcaaccactagtcgttgaatcgtatgactggtggcgataattagggcatcggcttggcccatcgaaatgatggacgtcgtgatttcttggaagtagcgtttcttatcactgttagctacatcgccgtacattaattcttcggtaatgtagacgaaatcgggcgccattgctttacggacttttgagcgtgtgtattttgtggagacaaattttaagaggtcgattaaccgtttaaaagtggtgaggtaccactggtcgagttcactagcagatagttgtgcgtgtttgagtgcaagccgctcagttgggtagtaaactaaaaaagcgaacgcctgcattgtatcttcagtcatttcaccggaaaagacctctgtaattttttgccggagattccctgcgccagtgcgaatgagatgctggaaggcatcatattcgccatgtaaatcactcatgaaggcttcagtgggtttgggaaggttcaagatggcctttaagttgatgatttcggaagtaattgccattttagtggggtatttttcggataacgttttcattttgttgttaatcattcgccgagctcctttgataaactaatagttcgattataccaatcgtaaatataaatgcaaattactttgtttaaaaacattttattagtatataccaattaaaaaagtcgcgcagtttagcgcgacttctggaaactattgatcttggatggtgccatcaacgtggcgttcaactttcatttgcgtcattgggatgtagcccagtttagggacgattgtcttttgaacgtcttttgattggatgaagtggatgaaacgggctgtttgatagttaggtgcgcccttagtatacatatgttcgtaagaccagattggccatgcattggttgaaacgttcttttcggtaggttcaacgtcgtttaacttaacagcttgcaagttacctttgatgtatgggaaggcgaggtaactgatagcgcctggcgtttgttcgacgattttttgaacagtcccagaggaatcttgttcttggctggtaacaactttgtcggttttaagacctaatttttcaaacgtttgacgtgtcccacttccttgggcccggttgataacggtgattttttcgttaggaccaccaacggtttgccagtttgtgatttcgcctttaaagatgcctagcaattgtgcactggttaaatttttgatgcctaactttttattaacaacgggtgcgattgcaaccacagcaactttgtgatcaaccagtttcttagtatcgataccatctttttcttcagcgaagatgtccgagttaccgattgtgacgttgccaccactaatttgggttaaaccagttcctgaaccgccaccttgaacggtgacgttgactttagggttatccttttgatattgatcgccagcttgttcaacaaggggttgaagggctgtcgaaccaactgcagtaattttagcgccttgatcctggctttgacttgcactttttgattggccttgacaaccagctaataaaagagcggccgcgccaactgtgagtaatgccatactaatgcgtttcataatgattcctcctgaggactgatttaagggtacaagttcagtatagagacgtcgtgtaaagattgaccgctaattcgtgtaaaaaacgtaaatgataagtcgcgagtttgtaaatgattccgtgaggggcttgaagattgtatggctgcttattgtgccaatcgagctattttagcgccaattgaatgtgcagaaaagtcgggctattatatggaagtaaaagaacattatggacgctaaattaagggatgaataacccgaggcagattattgacttttagtagtaaaagaagtatattatacagtaactgcgaaaatccgtagaaaaatttattgtgctgatctattgtccagcacggtattcatgaaaaacaaaaatagttagtctgatttattcagcttaaaataactgtttttgttttttttctgctcaaaattacctaaaaatggcgatgtaatattttcttaatatttgtcatatttttgtaataatgaggctgcggaaaacttatagaggggtgaacaatttggcaggacacttagtgaattacggtaaacatcgtactcgtagaagctacgcacggattaaagaagtgctagaactaccaaacttgatcgagatccaatctaattcctatcaatggtttttagacgaagggcttcgtgaaatgtttgatgacattatgccaattgacgattttgctggtaacttatcattagaattcgttgattaccaacttcttgaacctaaatacacggttgaagaagctagacaacatgatgccaactactcagcaccattacacgttactttgaaattaacaaaccatgaaactggtgaaattaaatctcaagacgttttctttggggacttcccattgatgactgaccaagggactttcatcatcaacggtgctgaacgggtaattgtttctcaattagttcgttcaccaggcgtttatttcaacagcgctgttgataaaaacagccgcacaacttatggtacaactgtcattcctaaccggggtgcatggttagaatttgaaacagatgctaaggatattgcatatgttcggatcgatcggacacgtaagattccaatgtctgttttagttcgtgctttaggttacggttctgatcaagaaattatcgatatcttaggcgacaacgattcattaatgttgacgttagaaaaagatatccataagaatactgacgactcaagaacagaagaagctttgaaggatgtctacgaaagacttcgcccaggcgaaccgaagacagctgatagctcacgttcattactttatgcacgtttcttcgatgctaaacgttatgatttagctgctgttggtcgttacaagatcaacaagaaattaagcttaaagacgcgtttattgggtcaaacattagctgaaacacttgctgatcccgatactggtgaagtgattgctgctaaagatacagttgttgatcgtcaagtgatggatgctttggcaccatacttagacaaagaagacttcaagacggttacttaccaaccatctgatgaaggtgtcttaccagaaccaatgacactccaagtgatcaaagtgtactcacaaaaaacacctgataaagaaatcaacttaatcggtaacggtcatatcgatgccaagattaagcatgtcattcctgctgatatcatcgcttcaatgaactacttctttaacttacaagaaggtctcggttcaacggatgatattgatcatttagggaatcgtcggattcgttcagttggtgaattgttacaaaaccaattccgaattggtttatcacggatggaacgtgtggttcgtgaacggatgtcaatccaagacacaagcaccgtgacacctcaacaattgatcaatattcgcccagttgttgcctcaattaaggaattcttcggttcatcacaattgtcacaattcatggatcaaaccaatccccttggcgaattgacgcataaacgtcgtctatctgccttaggacctggtggtttgactcgtgaccgtgccggttatgaagttcgagatgttcactatacccattatggtcgtatgtgcccaatcgaaacccctgaaggccctaatatcggtttgattaacagtttggctagttacgctgttgttaaccgttacggcttcatcgaaacaccatatcgccgtgttagttgggatacgcatgatgttactgataagatcgactatttaacagccgacgaagaagataactatgtcattgcgcaagccaactcaccattaaacgatgatggttcattcgttgatgatactgttttagcacgttacaaagatgacaatattgaaacttcaatcgacaagttagattacatggacgtttcgcctaagcaagtagttgctgtcgctacggcctgcattcctttcttggaaaatgatgattcaaaccgtgccttgatgggtgctaacatgcaacgtcaagctgtgccattggttgacccacatgcaccacttgttgggacagggatggaatataaagcagcccacgattcagggattgctttattagcacaacatcccggaactgttgaatacgttgatgcgaaagtcattcgcgttcgtcgtgaagacagctcattagatacgtacgaattaatgaaattccgtcgttcaaatgctggtaagaactacaaccaacgtccaatcgttgcaaaaggcgatcacgttgatgttgatgaaattatcgctgatggaccagctatggaaaaaggtgaattagccttaggtcaaaacccattgattgctttcatgacttggaatatgtataactacgaagatgcgatcgttctttcagaacgtttagtgaaagaagatttatatacttcaatccatattgaagaatacgaatcagaagctcgtgatacaaaacttggacctgaagaaatcacacgcgaaattcctaacgttggtgaagattcattgaaggatcttgacgaattcgggattgtccgtgttggtgctgaagtcaaagatggcgacattttagttggtaaggtaacgcctaagggtgtgacagaattatcagccgaagaacgcttattgcacgctattttcggtgaaaaggctcgcgaagttcgcgatacatcattgaaagtacctcatggtggcggcgggattatccaggacgttaagatctttacgcgtgaagctggcgatgaattgtcaccaggtgttaacatgatggttcgtgtttacattacacaaaaacgtaagatccaagtcggcgataagatggctggtcgtcatggtaacaaagggactgtttcaatcgttgttcctgaagaagatatgccatacatgccagatggtaccccagttgatatcttattgagtcccatgggtgtgccttctcgtatgaatatcggacaagttcttgaattacatcttgggatggctgctagaaacttaggcatccatgttgcaacaccagtctttgatggtgcgcaagataaagatttatgggacgctgttcgtgaagcaaacatgccttctgatggtaagagcattctttatgatggtcggaccggtgaaccattcgatacacgtgtgtcagttggtgtcatgtactacatgaaactagcccacatggttgacgataaactccatgcacgttcaatcggaccttactcacttgttacgcaacaaccattgggtggtaaagctcaatttggtggccaacgtttcggtgaaatggaagtttgggctcttgaagcttacggtgccgcttataccttacaagaaatcttaacttacaagtctgatgacgttgttggtcgtgtgaagacatacgaagcaatcgttaagggtgaaccaattccaaaaccaggtgttccggaatcattccgagtattggttaaagaattacaatcacttggcttggatatgaaggtcttggatatcgataatcaagaaattgaattacgcgatatggacgacgatgatgatgatatcgaaaacatcgatgcattatctaaatacgctaaagaacaagaagccaaaaaggcacaagaagaagctgaaaaagcacaagcagcaaatgctgatgcagtagatccatctgctgaataaagcgtgctataaattatgaggaggtcggccctttgatagatgtcaataagtttgaaagtatgcaaattggtttagcatcttcagataaaatccgtagttggtcgtatggtgaagttaaaaagccagaaacaatcaactaccgtactttaaaacctgaacgtgatggcctttttgatgaacgaatcttcggacctacgaaagattgggaatgtgcttgtggtaagtacaaacgaattcgttataaaggaattgtctgtgatcgttgtggcgttgaagttacacgttcaaaagtgcgtcgcgaacgcatgggacatatcgaacttgcagcaccagtaacacatatctggtactttaaagggattcctagccggatgggtcttgtcttagacatgagccctcgtgcattggaagaaattatttacttcgcatcatacgttgtgattgatccaggcgatacagccttagaaaagaaacaactgatgaccgaacgtgaatatcgtgaaaaattagatgaatacggtaatcgttttaacgctaagatgggtgctgaagccatcaaagaattgttacgtgacgttgatcttgaaggcgaagttgctgaattaaaggaagacttgaagtcagcacaaggtcaaaagagaacgcgtgctatccgtcgtttggacatcttagatgccttccgtaaatcagggaataaccctgaatggatggttatggatgctattccagttattccaccagatttacgtccgatggttcaattggaaggtggccgttttgccacatctgatttgaatgatttgtaccgtcgtgtgatcaaccgtaacaaccgtttgaaacgtttgttagacttgatggcaccaagcatcatcgttcaaaacgaaaaacggatgttacaagaagccgttgatgctttgattgataatggtcgtcgtggccgtccagttactggacctggtaaccgtccattgaagtctctttcacacatgttgaaagggaaacaaggtcgtttccgtcaaaacttacttggtaaacgtgtcgattattctggtcgttccgttatcgatgttggtcctacattgaagttctatcaatgtggattaccacgtgaaatggcacttgaattgttcaaaccattcgtcatgcacgaattagtgaaacgcgatatggcttcaaacattaaaaatgcaaaacgtaaaattgatcgtcaagatgacgatgtttgggatgttttagaagatgtcatcaaggaacgcccagttctattgaaccgagcacctacattgcatagacttggtatccaagcattcgaaccaatcctggttgatggtaagtcaatccgtcttcatccattagcttgtgaagcttacaatgccgatttcgatggggatcaaatggcgatccacgtacctttatctgatgaagcacaagcagaagcaagaatgttaatgcttgccgctcaccatattttggcaccaaaagatggtaaaccaatcgttacaccttctcaagacgttgttttagggaactactacttaacgcttgaacaaaaaggtagtctcggcgaaggcatgatcttcaaagatacaaacgaagttttaatggcttatcaaacaggtcacgttcatttgcacagtcgaattggtttgtcagttgttgatatggataatcgtccattccctgacgaacaacgccacaagattatggtaacaagtgttggtaaagtgatgttcaacgaaatcatgccaactggcttcccatatttgaacgaaccaacaacagataacttgatgaatggtgtgccagataaatacttcatcgataacggtgaagatattcatgactacctctcaagtgccccagtgatcttaccatttaagaaaggcttcttaagtgatatcatcgcgcaagtcttcaaggtatataaggttcaacggacatctgacttattggatgatatgaagaccttaggttacgttcaagcgacccatgctggtttaacagttggggttgccgatgttcctcaattacctgaaaaacaagaaattgttgatgaagcccataagaaagtcacaacggtttctaaacaattccgtcgtgggttgattacagatgaagaacgccatgcgcgcgttattgaaatctggaacgatgctaaagacgatatccaacaacgactcacagattcgtttgatccaacaaacccaatctcaatgatgtctgattctggtgctcgtggtaacatctctaactttacgcaacttgctggtatgcgtgggttgatggctgctcctaatggtgggatgatggaagttcctgttacatcaaacttccgtgaaggcctctctgtcatggaaatgtttatgtctacccatggtgcccgtaaagggatgactgatacggcgcttaagactgccgattctggttacttaacacgtcgtttagttgatgttgctcaagacgttatcattcgtgaagaagattgtgggactgatcgtggtcttctcattcactcaattcgcgaaggtaatgaattaatcgaaccattgtatgaccgtcttgttggtcgttgcgcaatgaagaccattgttaacccaacaacgggtgaagtgatggttcaacgtaaccaattaatggatgaacaacttgctcaagctgttgttgatgccggtgttgaagaagtcacaattcgttctgtcttcacatgtaacacaaaacacggtgtctgcaaaaaatgttacggtcgtaacatggccaacggcgaagaagttgaagttggtgaagcagtcggaacagtcgcagctcaatcaatcggtgaacctggtacgcaattaaccatgcgtaacttccataccggtggggttgccggcggtgaagatatcactcaaggtttgcctcgtatccaagaaattttcgaagcgcgtaatcctaaggggcttgcaacaatcactgaagtaactggtgaagttgttgcggtggaagaaaaccctgcagaacatacacgtgaaatcactgttcaaggtgaaacagatacacgttcatatagtgtgccttacacagccaacgtcatcgttaacgaaggcgacatggttcgtcgtggttctaagttaacgggtggttctgttgatcctaaacaattaattaaagtccgtgacgtcttatcaactgaaaactacctcttgcatgaagttcaaaaagtttaccgtatgcaaggtgttgaaatcggcgataaacacgttgaagttatggtccgtcaaatgctacgtaaagtccgtgtcatggatccgggtgatacagaaatcttacctggtacattaatggatattagtgaatttacagaccgtaaccacgaaaccttaattagcggtggcgtacctgctacttgtcgtcctgtcttgcttggtattacgaaagcatcattggaaacaaatagtttcttatcagccgcatcattccaagagacaacacgtgtcttaacggatgcttctatccgcggtaagagcgatccattacttggtttgaaagaaaatgttatcatcggtaagattgtcccagctggtactggtatggcgaagtatcgtcatatggaacctaagacagtcggcgctgtatcagaaaatgtctactcaatcagtgacatcgaagcacagatgaaagaagaaacaaaagaataactgagtgccaatttagaacagttgctctaaattgcacgttaaagggcctcaccgacatggtgaggcccttttttatgtgtttgcaataaacaaaacgattaagacaccgtagctgatatacgggacaaatggaattgggcggcgtccgactaaggcgaggacaactggatggtggagactatcaatgagatatttgattaaacagaggagacaggcaattaataacatggatagggtgacctccaatccaaaccacaacccaagaattgccaataattcaatgtcaccagtaccgatgccatctgaaaagtagttgatgacagataaggtgctgccaatcaatagggcactgagccaatggtttgtcggccagtagtcaataaacaaaggcataaaagccagtaccattggaactgggtatagagctgtatggaaaatatcgactaggctcaacaaataaaggataagcaataaatagccaatctgtggtgtgaaatattgactggctaaacaacacgctaacaagccgccaataacctcactagtaaaaaaatggtgctggattcgagtatcacaatagcggcagtgccctctgagaatgaggtaactgataattggacataagtcgtaccaagcgagggcgtgatggcagaagtcacaccgtgaaccaggccatgtgatggataaaccgagtggccaacgccaagcacaaacagttaaaaaagaggcgcaacacgcgccaataacaaaggttaaaaaatatattaacaaacgtgtcatctcctttatgataactacaaaaaaagggcgcaactttttctgaaaaactggcttatagcacgttgactttcgtagttgtgcatgctattcttgtagatgtgctttttacggaagttttctgatattcagacatgctgactgacgtctaaaaatgcattacaatccacgcaatctaggttgccatttttttatcgcaaaaaaagaaccacctggatgtgtggacttaaaactcaaaaataactttcagatcaaggaaggaggaaccttcaaatgccaacaattaaccaattggtacgtaagggtcgtaaatcaagaacttcaaagtctgatgcacctgcattaaactttggctacaacagtatgaagaaaaaagctacagataatccagcaccacaaaaacgtggggttgctactcgtgtgggtactatgacacctaaaaagcctaactctgctttacgtaagtatgcgcgtgtgcgtttatctaacttaatcgaagttacagcttatattcctggtattggtcataacctacaagaacatagtgttgttcttatccgtgggggccgtgttaaggatttacctggggtacgttatcacgttatccgtggtgctttagatactgccggtgttgacggtcgtatgcaaagccgttctaagtatggtactaagagacctaaaaaataacacacaaaaaaatttgaaaaagtcgattgaagtttaaatgacactgtgtgttacttcaaggacttaaatatcttgaggaggttatcaggatgccaagaaaaggctatgttgcaaaacgtgacgttttacctgatccaatgtacaattctaaattggtttcacgcttaatcaaccgcttaatggttgatggtaaacgtggtactgcgtcaacaatcttatacgatgcatttgatattattaaagaagaaactggtaatgaaccattagaagtgttcgaagaagctatgaacaacatcatgccagtacttgaagttaaagctcgccgtatcggtggttctaactaccaagtaccaattgaagttcgtccagaacgtcgtacaactttaggtttacgctggttagtaagctatgctcgcctacgtggggaacataccatggatcaacgtcttgcacgtgaaatcatggatgctgccaataacactggtgctgcagttaagaaacgtgaagatacacataaaatggctgatgccaaccgcgcatttgcacattatcgctggtaagattaacaaggttggctgttatatgtattcaaatcatataatggcctcttgttgtatatagcttaatattcgagaggagtaatattcacttatggcaaacaaacgtgaatttccgttagacaaaacgcgtaatatcggtatcatggctcatattgatgctggtaagacaacaaccacagaacgtatcttgtactacactggtaaaatccataagatcggtgaaacccacgaaggggcttcacaaatggactggatggaacaagaacaagaacgtgggattacaattacatcagctgctacaacagctgaatggaaaggtaaccgagttaatatcattgatacaccaggacacgttgatttcacaatcgaagttgaacgttcattgcgtgttttagatggtgcaatcactgtcttagatgctcaatcaggtgttgaacctcaaactgaaaatgtttggcgtcaagcaactacttatggtgttccccggattgttttcgttaacaagatggacaaacttggtgctaacttcgattactcaatgacaacattggaagatcgtttacaagctaatgcacatgctgttcaaatgccaatcggcgctgaagatgaattccaaggcgttattgatttgatcgaaatgcaagctgacatctatgatgaagatgaattaggtgctaagtgggatacagttgatgtacctgctgactaccttgaagaagctacaaaacgtcgtgccgaattagttgaagctgttgctgatgttaatgacgacattatggacaaatatttagaaggcgaagaaatttctaaagatgaattgaaagctgctattcgtcaagcaactatcgatttgaaattcttcccagttttcgctggttcagctttcaaaaataaaggtgttcaaatgttaatggatggtgttgtagattacttaccatcaccattagacgtacgtccttataacgctaaaaacccagaagatgattcagaagttgaattgatggctggcgatgacaaaccatttgctggtttagcatttaagattgctactgacccattcgttggtcgtttaacattcttccgtgtttatactggtacattacaatctggttcatacattttgaatgcaactaaagacaaacgtgaacgtgttggtcgtttattacaaatgcattcaaatcaccgtaacgaaattcctgaagtattctctggggatatcgctgctgcaatcggtttgaagaatacaacaactggtgattcattgactgacgttgatcatccattaatcttggaatcaatggaattccctgacccagttatccaagtttctgttgaacctgaatcaaaagaagatcgtgataagttagatcttgctttacaaaaacttgctgaagaagatcctacattcaaggctgaaaccaacaatgaaacaggcgaaacgcttatttctgggatgggtgaattgcatttggatatcatggttgatcgtatgagacgtgaatttaaagtggttgccaaaattggtgaacctcaagttgcttaccgtgaaacattcacaaaacaagcatctgcacaaggtaaattcgttcgtcaatccggtggtaaaggtcaatatggtgatgtttgggttgaatttacacctaacgaagaaggtaaaggcttcgaattcgaagacgctatcgtcggtggtgtggttcctcgtgaatacatcccatcagttgaacaaggcttgaaagaatcaatggcaaacggtgtcttagctggttacccattgattgacgttaaagctaagttatatgatggtagttatcatgatgtcgattctaatgaatcagcatttaagattgctgcatcaatggcattgaagaacgctgctaaacaagctggcgctgaaatccttgaacctatcatgaaggttgaagttattgctcctgaagaatatcttggcgatatcatgggacaagtaactgctcgtcgtggtgctgttgaaggtatggaagcacgtggtaatgcccaaatcgttaatgcaatggtaccattgtcagaaatgtttggttatgcgacaacattacgttcagctacacaaggtcgtgggacatttacaatggtatttgaccactactcagctgttcctaagagcatccaagaagaaatcatcaagaagaacggtggccaataagccgctaatcttaagtgattggtttcgattggaaaaggactcgtcattgcgacgagtcctttttttgtacgtaaaaatgcgattttacagtttcgtaaatgaaagttcatatttaattcataactggttggtattctgtatacatcagatgaattcctcccaagaaataatctgaaaaggtaaaaatgcttttcaaggtggttagcttttgagcataacatagcgaggataatgagcaacgaaggtgatcgttgtcttcgcgtagttaggtggaaaaagttaccttgaaaagcaagattaaatgaattttcattagacaattcctccctaaagaatccgtctaagtaaagcaccgccaatgagttatagtttaatggtaaaacgaaccggcccatttgaaattcctcccaagaacagtgaatggttttctggtgattgatagagacttgctttcgaaggcgcaaggatttgttgatcattaagactggttcatgcgggttcaatccccgctaactcgatttgccaccgccctggcaaaaaaactcaaactctttttcatataaacttctccaaaaaagggagttacgacaaaaatcacttttgtcgtaactccctttttgtgtttctaggcacggcttactgagttagttttgttttgtaggacgtgttttcaaactgcccatcagacgtttaacctttgcttgttcgatttcgcgggcggatagttgactatagtccgcttcgatagccagtttattgaaatcagctagccgttcaggcattaatgaacctgcatcgattgcggctcgtacggcgcaactgggttcgctttgatgctggcaatccttaaatcgacagtcctgtgcgagcgtctcaatatcagtaaagactgtcttgagtgccttagacatgctacttgtcatgccgagttcgcgcatgccaggagtatcgacgatgaaggccccgctagcagtttgataggcttgtcgattggtggttgtgtggcgccccttatcatcgtcagcgcgaatgccgctcgttaaaacggaaggctctttaatgagctggttgatcagggttgatttaccaacgccggatgagccgacaaatgtcacccattgtccagctgttaaatacggtttgaaagtcgctgcaacatttgatgccgtctggccagttgtgatgacgggaacgctgtcgaatgtcacacttgcgatggcgtcaagaaaggttgttagctcagagtcgctgactaaatcggttttactcaaaacaatcaccggtgttgcgccgctatcccaagccatcgttaaatagcgttgtaagcgcgcttcgctgaattcttgattggcggatgttacgatgaaaatcgttgcaatattggccgctaaagtttgaatccatagaatgggtacattgtcccgtcatttaagatagcagatgatcgttaaaagtcaaattagataattgtagctccgaggctgtttttaaaatgcgcgagtgcccattcttgcccgttcggtgtaaaagttgcgacagcagcggctggaattgttagtgggtaatttaagttgtatgccgagactgcagtgtggagcacgcaaatgtcggtgcaaacgccagtcagtgttaacgcgtcaatctcgcgctcgcgtaagaaattatccagattagtgttagcaaatgctgaatagcgattctttgcaaatgcatagacgtgaggatcggtttggtgcttggtgtaccagctagctagtggtccgtaaaactcatggccccaagtattggctagattatgtggtgggaatagggcgctctctggatgaaatggatcatccttgacgtgtaaatcagtcggtaagatgacgtaatcaccggctgctaggaactggttagctaattcgataattacaggaacgattttctgagcgggtttgccggctgtcagagcaccgtttgggtcaacgaagtcatttgtatagtcgataatcaaaagtgcgttatgggacatgataaggacctcctggaggggatttaagttgctttcagtgtatcaaaacatggctagaaatccacgaatgacgcttgctacaagatttatgaaaatgttatgaaaaactttgataaatcagcaaaaaagggttgcgttatcgggttgtatcttgtaagatagataaagtgctatttccatagcaggagtgcgcaccatggtagtcaaaaagattaccgagtagctaagatgtgagaggttgcgacacacccggccgctttgccatgggcgggcgtgccggaaaaattttcacggagctagtctacttttaaaatagacgaaggagggaaaaacatggcaaaacaaaagattcgtattcgtttgaaagcattcgaacaccgtattttggatcaatcagctgacaagattgtggaaacagcaaagagaacaggtgctactatctctggcccaatcccattaccaactgaaagaacactttatacagtgcttcgttcaccacataagcataaagattcacgtgaacaattcgaaatgcgtacacacaaacgtttaatcgatattgttaaccctacacctaagacagttgattcattgatgaaacttgacttaccaagtggtgtagatatcgaaatcaagctttaattcgtaccaaccaattaaaaatactagaaaagaggtgttaccatgaccacaaaaggaatcttaggtagaaaagtaggtatgacacaagtctttactgaaaacggcgaattaattcccgtaacagttatcaaagcaactccaaacgttgttttacaagttaaaacaaacgaaacagacggctatgaagccatccaagttggttttgaagataaacgtgaagtcttgtcaaacaaacctgctaaaggtcatgtagcaaaagcaaatactactcctaagcgcttcattagagaattcagagatgtcgcattaggagattacgaagtaggaacagaaatcaaagttgatactttcgcagccggcgacgtcgttgacgttactggtgtaacgaaaggtcatggtttccaaggtaacattaaaaaagacggacaatcacgtgggcctatgggtcacggttctcgttaccaccgtcgtcctggttcaatgggtgctgttatcaaccgtgtcttcaagggtaaattattacctggacgcatgggtaacaaccaacgtactgttcaaaaccttgtggttgtaagtacagatgttgaaaagaacgttatccttgttaaaggtaacgtgccaggtgctaaaaactcaatgattacaatcaaaacagctgttaaagctcgtaacaaataatctgagaagggaggattttaccaatggcaaacgtaacattatttaaacaagatggtagccaaaatgggaacgttgaattaaacgactcaatctgggctatcgaacctaacgaaaacgttgtgtttgatgcaatcatcatgcaacgtgcttcattaagacaaggaacacacgctgttaagaacagatcagctgttcgtggtggtggtcgtaaaccttggcgtcaaaaaggtacaggtcgtgctcgtcaaggctcaatccgttcacctcaatggcgtggtggtggtaccgtatttggtcctacacctcgttcatacagctacaaattacctcgtaaagtacgtcgtcttgcaatcaagtcagtactttcacaaaaggttatcgacaatgatttagttgttgtagatgcattcaactttgacgcacctaagactaaagaattcgctgaagtacttaacaagttagacgttaatactaaagcattggtagtacttgaagacggaaatgattttgctgcattatcagctcgcaacttacctaatgtaactgttgtagctgctgatggtatcaacgtattagacgttgttggcaaccaaaaattaatccttactcaagctgctctttctaaaattgaggaggtgcttgcataatggaagcacgcgatgttattttacgcccagtagttactgaaaattcaatggctgcaatggacgacaagaaatacacatttgatgttgatgttcgtgccaacaaaacacaagtgcgttacgcaatcgaagaaatctttggtgtaaacgttaaaaacgtaaacatcatgaacgttcgtggcaagttaaaacgtcaaggtcgctatgctggctatactaaaaaacgccgtaaagcaatcgttactttaactgctgattcaaaagaaatcaagattttcgaagattaagcaacacttaaatagaataattataggagggtatacacgtgggaattattaagtacaaaccaaccacaaatggtcgtcgtaatatgaccagctcagattttgctgagatcacaaagacaacccctgaaaagacgttgttggaatcccaaagccatactgctggtcgtaatgcacatggtcatatcactgttcgtcatcgtggcggcggtcataagcaaaaataccgtgtcatcgacttcaaacgtatcaaagatggtatcaaagcgactgttaagtcaattgaatacgatccaaacagaacttcaaatattgcattaatccaatatccagatggtatcaaagcatacatcatcgcccctaaaggtcttgaagtaggcatggttgttgaatctggtgtggatgccgatattaaagtaggtaacgcattaccattagctaatattcctgatggtacacttatccacaatatcgaattaaaacctggtaaaggcggccaattggttcgttcagctggtacatcagctcaattattaggtaaagaaggcaaatacgctatcgttcgtttaacttctggcgaaacacgtatgatcctacttacatgtcgtgcaacgatcggtactgttggtaacggtcaacacgaattaatcaagattggtaaagctggccgtaaacgttggatgggtatccgtcctacagttcgtgggtcagtaatgaaccctaacgatcatcctcatggtggtggtgaaggtaaagctccaatcggtcgtccttctcctatgtctccatggggtaagaagacgcttggtaagaagactcgtagtagtaaggctcgttcagagaaacttattattcgtcatcgtaaatcaagataatcaattccaattgaacatgtctaaagccaatgcggcttaaacataagtcacattgaactttttattcgaaggaggtttcataatgagtcgtagtttgaaaaaaggaccattcgcagacgcacacttgctcaacaagattgaagcacaagccgatagcgaaaagaaacaagtcatcaagacttggtcccgtcgctcgacaattttccctagctttattggctacacaatcgctgtttatgacggacggaaacacgttcccgttttcatctcagacgatatggtaggccataaattaggtgaattcgtaccaacaagaactttccatggtcatggaaatgacgataagaaaacaaaagcacgctagaaaggaggatgaactcaatggcagatcaaattactagtgcaacagctagcgcaaaatcagttcggatggcagcccgtaaagtacggatggtagtcgacttgattagaggcaagagcgttgcagaagcaattgcaatcttagaatttacaccaagagctgcttcaccagtcgtaatcaaagttttgaaatcagctatcgctaatgcagaacataattacgacttagatgcagaaaacttggtcgttacagaagcttatgctaacgaaggaccaacattgaaacgttttcgtcctcgcgctaaaggctcagcatcaccaatcaacaaacgtacaagtcacatcactgtagttgtatcagaaaaagaagcataaggagggatatcgcgtgggtcaaaagattaatccaaccggttttcgtgttggcgtcatccgtgattgggacgctaaatggtatgcagaaaaagatttcgcaacattcttacacgaagatcttaagattcgtaaatatatcaacacaaaattagctgacgcatctgtctctactattgaaatcgaacgcgctgcaaatcgcgtgaacgtttcaatccatactgctaaacctggtatggtcatcggtaaaggcggttctgaagtagaaaatctacgtaaagaattaaacaacttaacaggtaagaaagtacacatcaacattgtggaaatcaagaaacctgatttagacgctcacttagtaggtgaaggcattgctcgtcaattggaagcacgtgttgctttccgtcgcgctcaacgccaagctatgcaacgtacaatgcgcgctggtgctaagggtattaaaactcaagttgccggccgtttgaacggtgctgacatgtctcgtgtcgaaacacatgctcaaggaactgttcctttgcatacgctacgtgcagacatcgattattcatgggacgaagccatgactacttacggtaaattaggagttaagacttggatttatcggggcgaagtattacccgctaaagccaacaacaatacgaaaggagggaaataaacatgttagtacctaaacgtgtaaaacatcgtcgtgaattccgtgggaagatgcgcggtgctgcaaaaggtggcaaagaagtcacttttggtgaattcgggctacaagctttagaatcaagttggattaccaaccgtcaaatcgaagctgctcgtgttgccatgactcgttacatgaaacgtggtgggaaagtgtggattaaaattttccctcacaaatcatacactgcaaaaggtgtcggcgttcgaatgggttcaggtaagggtgctcctgctggatgggttgctgtagtaaaacgtgaaaaagtcatgtttgaaatcggcggcgtttctgaagaagttgctcgtgaagcattacgcttggcatcacataaattgccagttaaaactaagatcgtaaaacgcgaggaagtaggtggcgagtcaaatgaaggctaaagatattattgaattaaccactgctgaaatgcttgaaaaagaacaccaatacaaagaagaattattcaatcttcgtttccaacaagctaccggtcaattagaaaataccgcccgcttaaagcaagttcgtcagaacattgcacggattaaaactgtattacgtcaacaagaacttaacaaataataaatggaaaggagctatttactttgagcgaagaaagtcgtaaccatcgtaaagtgtaccaaggccgtgttgtttcagacaaaatggataaaacaattactgtcgtggttgaaacttataaaacacatcctgaatatggtaaacgtgttagatattcaaagaaatattatgcacaagatgacaacaacgaagcaaaagttggcgacgttgtgcgtgttatggaaactcgtcctttgtcacgtacaaaacggttccgtttattagatgtcgttgaaaaagcagttattatctaaatcgttactcaatatatataagtgacggaaggaggacctataagtgattcaatcagaaagtcgtcttaaggttgctgataactccggtgcccgcgaaattttaactattaaagttttgggtggttcaggtcgcaagactgctaacatcggtgatgttatcgttgcaacaattaaacaggcaacaccaggtggcgttgtcaaaaaaggtgaagttgtcaaagctgttatcgttcgtactaagtcaggtgctcgtcgtgcagacggttcttacatcaagttcgacgaaaacgctgctgttatcatcaatgatgacaagactccaaaaggaacacgtatcttcgggccagttgcacgtgaattgcgtgacagtgatttcatgaagatcgtttccttagcgcctgaagttctataattacagacaaccaaggaggtgcgtatatcaatgttcgttaaaactggtgataaagttaaagtaatcagtggtaaagataaaggtaaagaaggtacaatcatcaaagctatgcctaaagaaggccgtgttgttgttgaaggtatcaataccattaaaaagcatgttaagccaaatgctcaaaaccctaatggtgggattgttgacacagaggcaagtatcgatgcttcaaacgttatgctaattgatccatcaaccaacgaagctactcgtgtaggtttcaaagtgattgatggtaagaaagtacgcgtttcaaagaaaactggagaatcaatcgataaataatcttttggggaaaggaggcactttttacatgactaaccgtttaaaagaaaaatatgttaaagaaatgacaccagcgttgatcgaaaagttcaactacacatcaagcatgcaagtacctaagatcgaaaagatcgtacttaacatgggtgttggtgatgctgtttcaaacgctaagaatttggataaagctgttgaagaattaggtttgattgctggtcaaaaaccattaatcacaaaagctaagaaatcaatcgctggtttccgtttacgtgaaggtatgccaatcggcgctaaagtaactttacgtggcgaaagaatgtacgatttcttagataaattagttaacgtatctttacctcgtgttcgtgattttcacggtgttagtgcaaaatcattcgatggtcgcggtaattatacattaggtgtacgcgaacaattgatcttccctgaaatcgattatgataaggtagatcgcgttcgtggtttggatgttgttattgtaacaacttcaaatactgacgaagaagcacgcgaattgttaacacaatttggcatgccatttgctaaataaaaagggaggtcaatttcttggctaaaaaatctttagttgtaaagaatcatcgtccagcaaaattttcaacacaagaatattcacgttgcgaacgttgtggacgtccacattctgtatatcgtaagtttaagctttgccgggtttgcctccgtgaattagctcataagggccaaattccaggcatgaaaaaagcaagctggtaattataaagagtcaataaggaggttaattccacatggtcatgacagatccaatcgcagactatctaacacgtattcgtaatgccaacatggtacatcacgaatcattagaagtccctgcttcacgtatgaaaaaagaaatttctgaaattttgaaacgcgaaggctttatccgcgattacgaagtgattgaagacgacaaacaaggtatcatccgtgtattcttgaaatatggtaagaataacgaacgtgttatctctggtttgaaacggatttcaaaacctggtttacgtaattacgttaaagctaatgatgttcctaaggtattaaacggcttaggcatcgcaattatctcaacaagcaacggtgtcgtaactgacaaagaagctcgtgaaaaggctgccggcggcgaagttctcgcatacgtttggtaatctaaacttaaaataaggaggtgtcataacgtgagtcgtatcggattaaaagtaatcgaagttcctgcaggtgttaccgttactaaagacggtgaaaacatcacagttaagggacctaaaggtgaactaacacgtcatttcagtccagtgattgaaatgcacgaagaaggtaaccttatcaactttacacgtaatagtgaaagtgatcgtgcaatgcacggtactatgcgtgctaacttaaacaacatgatcttgggcgtaacggaaggtttcaagaagacattggatcttatcggtgttggttaccgtgctcaattgaaaggcaagactttagtattgaacgttgggtattcacatccagttgaaatggaagccccagaaggtgttacagtcgaagtcccatcaaacacaaacatcatcatcagcggtattagcaaacaacaagttggccaattcgcagctgaaatccgtgatgttcgtcctccagaaccttacaaaggtaaaggtattcgttatactgatgaatatgttcgccgtaaagaaggtaaaactggtaaataaagcagcctgagctgttaaacgatattaagaggtgaaaattgtgattacaaaaccagacaagaataagacacgtcaaaaacgccatacacgcgttcgtggcaagatctctggtactgctgactgcccacgcttgaacgttttccgttctaacaaaaacatctacgctcaacttattgatgacgtagcgggtgtgacgctagcaagtgcctcaacattagataaagaagtaaaagcagaaggtactaaagtagaacaagcacaacaagttggcgcattagttgcacaacgcgctgttaaagccggccataaagttgttgtttttgatcgtggcggttacttataccacggtcgtatcgaagctttagctacagctgctcgtgaaaacggactagaattctaataaggaggaaaaccatttatgacttacattgatccaactcatttagatttagaagatcgcgttgtttcaatcaaccgtgttacaaaagttgttaaaggtggacgtcgtctacgtttcgcagcaatcgtaatcgttggtgataaagacggtcacgtaggtttcgggacaggtaaagcacaagaagttcctgaagctatccgtaaagccgttgaagacgctaaaaagaatcttatcaatgttcctaaggtcggaacaacattacctcatgaaattattggtcgcttcggcgctggtcgtgttctattaaaaccagctgttgaaggttctggtattgctgccggtggtgctgttcgtgccgtcatggaattagcaggaatcgatgatgtgacaagtaaaacattaggtagcaaaactgctatcaatgttatccgtgccacaattgacggtttaactcgtatgaagactgctgaagaaattgcagaattacgtaatgtatctgtagaaagcttacaaaactaggaggataactgaacatggctaaattaaagattactttaagaaaaagtgctgctcatcgtcttccagaacaacgtaaaatggtcaaagaatttggcttgaaccgagtaaatagttctgtaatcaaaccagatgatgctgcaactcgcggtgtgattttcaaactcgcacatttagtaacagtcgaagaaattaaagactaatttcaacatatattgcaaggaggtgcgcacaataatgaaattacatgaaatgaaacctaacgaaggtgctcgtgacgttcgtaaacgtgtcggccgtggtacttcttcaggtactggtaaaactgctggtcgtggtcaaaaaggccaaaaagctcgtagtaaagtacgtttaggatttgaaggtggacaaatgcctttattccgtcgtatgccaaaacgtggattcaagaatatcaaccgtaaggaatatgctgttgtcaacttaaacgatttaaatcgttttgaagacggtgcagaaattacttcaactgttttaatcgaagcaggcgttgttaagaatgaattatcaggtgttaaattattagcgaatggtgaattaaacaaaaaattgaacattaaggtaagcaagtattctgaagctgcaaaagctgctgtagaagctgctggcggttcaattgaggtgatttaattgctaaagacactcaaaaacgcatttaaagtaaaggaaatccgtagtaagattttgtttactttaggcgttttgatcgtttatcgtttaggtgcacaaattacggtaccaggtgtgaatgctggtgcattgactaagttgggttcaactggtttgatcccattgcttgataccgtaagtggtggtggcttggcgaactattccatcttctcgatgggggtttcaccattcatcactgcccaaattgtggttcaattactacaaatggatattgtgcctaagtttgttgaatggagcaagcaaggtgaagttgggcgacgtaagcttaaccaagtaacgcgttacttaaccatcatcttagcgtttatccaatcgatagggattaccgctggctttaactcactcagtcaaatgggcttggttaaagatccggggattaagaccttcgttagcatcgggatcattttaacgggtggtacgatgttaattacatggttgggtgaacagataacggataaaggcttagggaatggtgtgtcaatgatcatctttgcagggatcattgcacgccttccaagcggtctttaccaaatcttccgcgaacaagtcttgaacgcttcaaaaggcgatatgtggaaaggtgtcttattcatcatcggtttgattattgcagtactcgtgattgtcacatttgtgacatgggtccaacaagcaaatcgaaagattccgattcaatatacgcgtcgtgaagctggtgcaggtgaaaatagttacctaccccttaaagttaacgtcgctggtgtgattccggttatcttcgccagttcatttattatgacacctcaaacaatcttactggccttccaatcaggtcatggtgcagatacttggtttaaagtattatcagatatcttcagcatgcagactgtgacaggttcgattgtttatacggtgctcattgttctctttaccttcttctatgcttttgttcaggttaaccctgaaaaagttgcggagaacttgactaagcaagggagttatatcccaggtgtttggccaggtaaaggtaccgagaagtatctttctagcgtattaatgcgtctttcaactgtcggtgcgttgttccttggggtaattgcattattaccacaattagcagcaaacctcggtggcttaccccaatcaattggtttgggtgggacgagtttactaatcgttgttggtgttgcgcttgaaagcacacgtcaactcgaagggttacttatgaaacgcaagtatgttggattcattcgataagcaattatcgtttaaaaagtattgaatcctggttttaaataggaggcaaaggcatgaatctcatgttaatgggacttcccggcgctggtaagggaacgcaagctgaaaagattgttgacgcttatcatattccacacatttcaactggtgacatgttcagagctgctatggcagatcaaacagaacttggggttaaagctaagtcattcatcgataaaggtgaattggtaccagatgatgtgaccaacggaattgttgaggaacgtcttgcacaagcagatactaatgtaggttatctccttgatggttttcctcggactcttgatcaggcggatgctttagctgccattactgataaattgaacaaacctttagatggtgtgattaacattgatgttgatcctgaaatcttggctgatcgtttatctggccgctttatttgtaaaaattgtggtgcaacgtaccacaaactttaccatccaactaaagtggaaggtacatgtgatcgttgcggcgaacatgttttcttccaacgagaagacgacaaacctgaaacggttaagaatcgcttaaaggtcaatatcgaaatgaatacacctttacttgattattatgaaaaacgtaacctactttacacggtagatgggaatcaagaaattgatgatgtgttctctgccgttcaaaaagtacttgataccattaaagactagtcatcaactcaagtgatctcacggtcattgttcacgtaaaagcctgactagttgtttaatgacagaattctcagtgcttttaaaaatttaatacttgtgatataatatctcggtatgaccactagcggtgagtgcggagagctctcaccatttttctgtatgaattttcacaaccacaagggggtacttttgcgtggcaaaagatgacgtcattgaaattgaaggtaaagtaactgatactttaccaaatgcaatgtttaaagtagaacttgaaaatggtgcagttattctggcacacgtttctggtaaaatccgtaagaactacatcaagattttacctggagaccgtgtgacagttgaattgtcaccctatgatttgactaagggacgaattacgtatcgctttaaataggcgtaaggatcatatcaaggaggtcagtcgatatgaaagtaagaccatcagtaaaaccaatgtgcgaacattgtaaagttatcaaacgaaaaggccgcgttatgattatctgcgcagctaacccaaaacataaacaacgtcaaggttaatattaattaagcaggaggtgcaagaatggcacgtatcgcaggtgtggatttaccacgtgataaacaaattgtgattgctttaacttatattttcggtatcggaaatacaactgccgttaaagtcttggctgatgctggcgtcgcagaagacgtccgtactcgtgatttaacgccggatcaagaagacaagatccgtgcagcaatcgacaaagttaaagttgaaggcgatcttcgtcgggaagttagcttaaacatcaaacgtctacaagaaatcggttcttatcgtggcatgcgtcatcgtcgtggattaccagttcgtggtcaaaacacgaagaacaacgcacgtactcgtaaaggtaagaaagttacgattgcaggcaagaagaaataatcagtaaaaggaggttataatttatggcaaacaagaaaaatgctccacgtaagcgtcgtgtgaagaaaaatatcgaagccggcgttgcacatattcactcaacatttaacaatactcttgtgatgatcactgatcctcatgggaatgctgttgcatggtcatctgctggttcattaggtttcaaaggtagtcgtaagtcaacaccttttgctgctcaaatggctgcagaagctgctggtaaagaagccatggaacatggtatgaaatctgttgaagttgctgttaaaggaccaggttctggccgtgaagctgcaattcgctcattacaagcaactggtttagaagttactgctattcgtgacgttacaccagttcctcataatggatctcgtcctccaaaacgccgtcgtgtttagtctgggctacgcttcattttgagacaaactgaaacgtgttcacgtataaacacttctcgttttgaaaggggtaaaagataagaatgatcgaatttgaaaaaccaaacattacaaaggttgatgaaagtactaactacggtaagttcgttgtagaaccacttgaacgtggctatggtacgactttaggtaactctttacgtcgtattttactcgcttctttaccaggtactgctgtcacagatattcaaattgatggtgttttacatgaattttcaacaattgatggcgtcctagaagacgtaacacaaatcatcttgaatattaaaaaattagcacttaaattgcatgttgaagaagacaagacaattgaaatcgatgttaagggtccggcaacagttactgctgctgatatcatttctgatgatgacgttgaagtcttaaatactgatcaatatatttgtacagtagctgaaggcggcaatttccacgtgcgaatgacagttaaaaaaggccgtggttatgttgctgctgatcaaaacaagtcagacgatatgccaattggtgttttgccaatcgactcaatttataccccaatcagtcgtgtcaactatcaagtagaaagtacacgtgttggtcgtcgtaacgatttcgacaagttaacacttgatgtttggacaaacggttccatcagtcctagagaagctattagcttagctgcgaagattatgacagagcatttggcaatctttgtagatcttactgatgaagcgaaaaatgctgaaatcatggtcgaaaaagaagagacacataaagagaaaatgcttgaaatgacaattgaagagttagatttatcagttcgttcatacaactgtttgaaacgcgctggaatcaacactgttcaagagttaactgacaaatcagaagcagatatgatgaaagttagaaatcttggtcgcaagtcgttagaagaagttaagaacaagttatttgatcttggcttaggcttacgcacagaagaataaactgataagaaggagggactccattcatgagttatcgtaaattaggtcgcacaagctcacaacgtaaggcaatgttacgtgatttgacaactgatttaatcatcaatgaacgtatcattactacagaagctcgtgccaaagaaattcgtaaaacaactgaaaaaatgatcactttaggtaaacgcggtgatttacacgctcgtcgtcaagctgcagcattcgttcgtaacgaagtagctgatattcgcgaagaagacgatgctgtaatcgttcaatctgctttacaaaaattatttagtgacattgctccacgttatgctgaaagaaatggtggttacacacgtattcttaaaacagcccctcgtcgtggtgacggtgcattaatggtgattattgaacttgtttaatcacaaaatgatttaggtcatttgatcgatgagacagggcgttatgatgatggaagtactccgagtctagtcctaaggtcatactagcaacacagtatggctttcatcgattgatgatttacataaaataacgtctaattccgagttaaatcggagttagacgttttttgtgttggatatcctttgaataaagggtgactaacgaaagcgctatggccttttatatgataaaatagggacaggtttttgatttgaaacgtgcatggataacataaccaatgcactttaattccaaggaaaatacgggttattaatcatgaatgagcaaaaaataattcaagttgaacatttaaaatatgaatacccacaatctgaaggacatttagcactgaatgatctttctgtcagtatcaatgccggcgaatgggtcgccattatcggtcataacggtagtggtaagagtaccttcgcgaaatcattgaacggtttgttagatttacaatcgggatcagtgacgattgatgggttaccattgtcgttggataacgtgtggactattcgccagaaaattggcatggtttttcagaatccggataatcaatttgtcggtgcaacggttgaagacgatgttgcttttggtctcgaaaatcaggggattccgcgagctgaaatgattgaacgggttaaagacgcggttgaacgtgttggtatgagtgaatacttgaaacgtgaaccaagccgtttgtcgggtggccaaaaacaacgagtggccttagcagggatcatcgcacaacaacctgagattctgattctcgatgaggccaccagtatgctagatccaaaagggcgcgaagaagttctcgcaaccatttataagttaaaacaagaaacaaacatgaccgtgctatcaattacccacgatattgacgaagccgcaagtgcggaccggatcattatcttagataaggggcaagtgcatgatcagggcacaccggccgatatttttgcatatgggcaacgtttgcttgatttagggctagatgttccatatccagaaaaacttaaagcagcgctaaatgaacgcgctatcgagatgcccacagattatctcacaacggaaaggatggttgagtacttatggacattacattcaaaaatgtaagctacacttatcagccaggcacgccttttcaagggattgggctagaaaatatcaatgtgaccattccaagtggctcctatacggctttgattggtcatacaggtagtggcaagtcgacattgctccaacacctcaatgcactcttaaaaccaacgagcggcgttgttcagattggtgagcgcgaaatcacgcctgagaccaacaacaaaaacttaaaggctgttcgtcaaaaagttgggatggtttttcaatttcctgaaagccaattatttgagtcgacggtgcaaaaagatattgcttttggtccgcagaacttcggtgtccctgaagctgaagcacttgaacgcgctaaagagatgattgaactcgtcggtttacccgctaacgtgattgacaagtcaccttttgatttatctggtgggcaaatgcgccgcgttgccattgctggtgtgttggcaatgaaaccggaagtattggtcttagatgaaccaaccgcggggctcgatccagttggccggcgtgagatgatgacgctttttgaaaagttacacagtgagcaggggatgacgattgtgatggtcacccatcagatggatgatgtggcgaactacgccgacaacgttatcgttttggaacatggcaagctagctaagaccggagcaccacgcgaaatttttgcggatccggattggttaacggaaaaacaacttggcttaccaacaacgactcagttcgcgcaagctttaatgcgacaaggctttgtctttgatcaagtaccactaaccgaacatgaattggccgccttattagcggaacaactaccgaagaaggcggggattggacatgaataaattaattctgggccgatatatccccggtgattcagtgttacaccggatggatccacgggcgaagttattagccagtttttattatattgggatcatctttttagcgcgtacatggcaagcctatgctttattactggtctttacgttagcgctaatcgggatttcaaaaattaaactcgacttctttattaaaggagttaagccgctgttatggctaattctatttacagtgctcttacagattttcttcacccgtggtggtcatgtctattggcagtggggatttctgacgcttacccagtacgggctgattaatggcgtctacatcttcatgcgctttgtattgattattttcatgtcgactctcctgacattgacgacgccgccattgtcgttagcggatgcgattgaatcaattctcaagccgcttaaagtagtccattttccagtgtatgaagttgcattgatgctatcaattgcattgcgctttgtaccaacattgatggatgaaaccactaagattatggatgcgcaacgtgcgcgtggggttgattttggtgaagggaatttattccaacaaatgaaagcaatcgtgccgattttaattccgttatttgtcagcagttttaaccgcgcggatgatttagcaacggcaatggaagcacgggggtaccaaggtggcgaaggccgcagtaagtaccgaattttgaaatggcggacaagagacaccgtggcatttatcacgatgggccttttaaccgtcgcacttttattcttaagataacgcaaaaaggactcagttaaaccaacggaggttgatttagctgagtccttttttttttgcacttttttgattagcttgtttttttgaaccgacgtttcaacgttgaagcactaatgccagtttggtaactaatttgagcgtacgtaaagccctcttcacgcatgtctagggctgcttgtatgttcatcatcagtataggtcgttttacgaccttcagtgtaactagggttggtgacacgagcattatggttcccttcctgggtacgagtgagaatcatatcgcgctcaaattgcgcaaaagcactaaataaggtaaaaatgagtcgtccggaaggggtgtcttcaatgatgcccatgttcaaaatatgaattttaatgcgggctttaaaaagttcttggatgatttcaagtgcttctttggtatttcttgcgaagcgatcaagttttgtaacaacgatggtatcaccacttgaaacccgatctaatagttcattaaatttagggcgatcaacggtagttccggtaaacttttcgctgtagataatgtcacagctttcttcctttaattgactaatctgggttgctagactttgtccggcagatgaaacgcgtgcgtatccgaacttcattgcacaattctccttatttctacttataataataattatacagcatttgaacttgttttatattaaaaatgcatttttaaatcaaattttttacgaacattcataaaaagattgctacttttcagaaaattatttagaatagaactactaactttttaacacaagagggataaaatgacacaacggtatcgcgtaacaattgcctatgatggaacggattttgcgggtttccaagtgcaaccgaaccaacgaacagtacagggcacattagaaaaagcactgacaaagatgagtaagggtgcttatattcaagtgtatggttcagggcggacggacgcaggtgtccatgcaacggggcaggtggtccatttcgactatccaggtcaattacccgctattagtatgttacgggccttaaatagcctcttaccgcttgatatggaggttgtggatagtcagttagcgggcgatgactttcatgcacgattttcaacggtcggtaaacggtatatgtatcgggtcgatcttgggcattatacgaatccattcaagcgacgttataccggtcattatccgtatccaatcgatgtggaacggattcaagcggcgctgccagatgtgatgggcacgcatgattatacgagttttgcggcttcaggtggggtcattaaggataaggtgcggacgatttatgatgcgaccgttgttttcaatgaacccgaaaatgaactcgtttttgagttttatgggaacggctttttgtataacatggtgcggatcttggtcggaactttattagaaattggtaacggtcggcgggatgtccacgattttttacggctgtatgaagttaaggaccgtcaacaagctcgctcaaccgcgccagcaagcggtttgtaccttaaaaaagtttattacgaaactgatgaaaataattgagattcaattgacttaatcgtgaaattacgatactatagtatctggtattgtttgccccacgataggccccggaaacttattgagtgtcaaacaaacacagaatattggaggaataaatcgtgcgtacaacttacatggctaaaccaggcgaagtagaacgtaaatggtatgtgatcgatgcaactgatattgcattaggtcgtctatcaactgtagtcgcttctatcttacgcggtaaaaataaaccaacatttacacctaacgttgatacaggtgataacatcatcgtcatcaacgctgaaaaaattaaattaacaggtcgcaaagcaaccgacaagttatatcatcaccatagtaaccatcctggtggtttgaaaactcggactgctggcgaaattcgtgaaaacaacccagaacgtttaattgaaatgtcagttaaagggatgttacctaagaactcattgggtcacaaccaattcttgaagttacacgtatacgctggtggcgaacacaaacatcaagcacaaaatccagaagtcttagacattacggacattatttaaggaggaaactatagtggctcaagtaacttataacggtacaggccgtcgtaaaaactcagtagctcgtgtacgtttagtaccaggtactggtaaaatcactatcaacaacaaagacgttgttgattacattccatttgctaacttgattttagatatgaaacaacctttaacaattactgaaacaacagatagctatgatatcttggtaaacgttaatggtggtggattctcaggccaagctggtgcaatccgtcacggtatttcacgtgccctattgacagttgaccctgacttccgtccagctcttaagagcgctggcatgttaacacgtgaccctcgtatgaaggaacgtaagaaaccaggtctgaagaaggcgcgtaaggcatctcaatttagcaaacgttaatatcgttatgctaccgagatggaaacgttggtacgacaacgtttcaaacgtatctcgtttaggaaagtggttctcccaattagggcgagccactttttttgtccctcgtttttgtgcgcgttttgtgcgcgtgtctctgtcgagggtcatttgcatcgcgaccttttagggcgtcagctcaagccttacgttgctttgtgcgtcaattttaacgagtttcgttgagtttcatttcctgcgcgagtgaattcttgcgcgcctctgcgatccgttcagcgaacttattatgcacatccagaccgaccacatcaggggtgtttacgtaaatccgcgtggtcttaatatcggagtgcgtcagcgcttcggagatcagttcgaggctggcaccaccttggcgagctagagtggagaacgtgtgccgcagcttgtgtggcgtcacgcgcaccagctcctctgcatggcgcttgtagattgaattcagtcgatagttcaagtagtccgcatggagcggttgattgatacctcctctaaagttggtgtaggtgaataggaactgatctgggccagcttggatattcacgtcagcaagctccttggcttgttgttccttccactctttcaaaagtggaatcagaaacgccgggatctggtgtgaagtttccttgttggctttggttggcccgattttgccgctctttttgagggcttgaataatcaggacgtaaccggtgttgaagtcaatgtgtttccattgcaacccgtatgattcgcctttgcgatcaccaaggttcaacgtcatcagcaacagcaagtagtcttggaaggacagcttccggttctcgaagtcttctttggcagcatcgagccaagcaatcatttcatcagcagatagagacgagccggtcattttacgccgagtggcgagccgctccttcttcgggctgccgaccaatcgtagggctttttcgatacggttggcgtcgatgtagtccatgatctcggcgacctcgaagacttggcgaacgtaagccttgaccgtgcgaatgttcgcgtacttctcagccaagattgaaagttcttgaaccacgaactgcttgttcaggttcaagtagttcagtgaataatcaccgaacagcggtagcaagtgcaaccggaaaatgttttgggtgttgacctgggtttcctcggaaggaacgacccggatgcgcccactaccaccggcagtgtacagtggccaccaaacttcccggtagaaatccttgaacaggatctcgccgttagtttgaatggaacccgccgacgccttgcgctgtgcttctttgatcttgtcttcgactttcttctgcaatgccttcgcttccagcttggttgcgacggttttgcggtaacgcagcgtctttacgccgatgatgtcgcgaatgtctttggggtagaacacctccacaaaataagtgcctgcatcagttttagtaattgccatgatatttacctcctgttggttgtcaacgagcttgaacaggacgtaaagctacatcgacatattaccatccttcaacacgtttgcgaagccatgcatcgacggcatcgcgatcataacgaaccacaccgcagacgttgattcgtggtaggccaaggccaatccacttatctaaggtgttgttagaaatttttaagtagtcgcacagttccatcttcaacagataccgattgttggtggcgagttcgttacgcgctttgttgacctcatcgagaaacaaggtggctagcgcgttgcgaatcgcgatcacgttgcggtcatccattggaaaatcgagtgtggactgggatgctggtgcttcgataaaacatgcctcctttccggcagtcacgaacagactgatgcgaatacgacaggcggtcatcattcagcccggttccaaccggctattgagaacctcgctgtgagacgctctttctcccgtttcgtggcagtgacgtacaagtatccggcctactggggtaatcgctcgctcgtgtgaggttgtggcgttgtgaggcctgcgttgctaaatgatggtattcagttgtcaaaggacatcggcggtaatcaaaaacccgcttcgttatatacagacaacgaaagcgggtcgaaatgaaagggattggtgaaaattgtttatgtttttttctgaccgggattttgtgagggtagcgcaaggtgctgctcaacgttgaagcacttcgcaatgtagatcagtttgatttgaagctcttgtcttaaatctggatcgacgtgccgttgcccgtacttggcctcgtagtcaatatcacggccaaataattcaagcatgagggaaacagcgtcgtcgttgtcctcctgaaccgccaaaataaccggtactaggttatcgatctctgaataatgcattgaatactcctccgcatccattacatgtttgtgtatgctgcccgaattcgattcaaagcccgttgccggcgataattcaccccctggccagttttgccggaacggctaccgatttccacgtcgttcagctcgtcataatagtattgatacaacaccatcttatcaggtagagaaagggaagcaaccgccgtggcaagacgctcgttttcgatgaagtcctccaagtgttcgatttcctcatcggtcagtttgagttcgtcaagatggtgtggatcttcaatttcttcgatgagccattcttcgagtggtgtctctttgattcggcgaagattgactttgtggcgattgattcgttcgttcttgagcgcttgctgcacatagcggataaacatccgcgacacttcttgttcactactcatttgaatggcctcctaaaatcaactaatgtggttacatatagacagacaactttcggcacatgaaatgaaaggggattcaggaatttgttaaataatttcacttgtacttagtggctgttgaactaggccgccatatcttcgacccttgtagtaaatttatagcgaatttgataggcctcaccctcgaatttagccaaaattaaaattggtatagcaaatacccttaacagggtcagcacattgctcaagacgatggccgcgtcaatcttgacggccagtgattcagctgtccgagtgttcaccaagtcaagccccagcgtgcccttcataaaagcaaaccggcgttcaatggtacctcttcgattctcggcatcagtatcctcacgccgtttcgctgcatcaacgtgttttggatgccggccaagcttcggaccgcagattcggatacccaaatccttacacagctttaggttctcccgattacggtacagcgtatcggccagtacttcatccggataatgtccatgaaggtcgtaatagtggtctaaagtttccgcgaagtcttggccctcagagaatgcggtgaaatcaaaacgttcaatgtcgactacgccttcacttaacgaacagtcaatcttcgccccaaattcaactttagcattggccttaccacgttgaattgggcgaatgtacggctgttggagactaacaattcggtcttcaacgtggtgagtcttgtgggtatacatgtaccattgctggtcaaatagaattcgaatcacgcctaagcgaatcgcttgttcatctggtagagtcgcaccctgatcgatgaattcgttgatgtaccgcaaatcacggcgcacatattgaagttgggccttgacctgtttatgaaagccaccacgctgttgctttggatgtcgtgaaaatgaggtccaacaatgcttcgcctcgcgtttgtacatgcgtgggtttggcacaccaagttggtgtgccatatcgatcgccatcgcctcaagattcagccttgcttggttgaggaggacggtgtcttgaggatacttgattttgactggcactgcggttgcgtccgtgatgacggtgtccactttgaatgggaccaacgcttcgatcttggcgcgtactgtatcattcatgatattcgtaatcagctcggagatatcggcaattcgtttgcgaaagtgtgccaggctggaataattgaacggctcaaccgctttgtattcggacaacccgatgaaatattgaagtgcgggtgtatcacgaattgccgcaaccaccccacgatcagttaaacccatccgttgttggatcaggattgccccatagagtaaacgaaatggttttgccgcacgtcccgcatttttggtgaactccaattggtatgcctcatcgagagctttccagggcatgacctccgccaactggacccactcattgttagagctaagtggggtacttaaaccggcaccaaaggattcaaatgacaattgaagtgggctgtgacgatagaccatacgataacctccgagtaggttcccaaaaaatgcaaggaaaatgcaggaaaacagctaattccaatggatttattataccgcaataatgcatatattagcttaactgcctgaattatagaatttttaagcagccactatgtagtggacactgaatatttgtaagtgccttgttttaatgggaaccgttccgttactgtcgtataatgaatgcagaggaatttcctgtttttggcagtttcccttgcacttgtcatctcgtaacggaggatttatccatggtttatcggcatactgacgttcaactatctttcgaatcgtttgatcctggattattcacctcggtatttgggacatgaaatcgcatctggccggtctgaaagcaacgtttggagcgttgcgaatactgactgagcggagaagttggtgatcgatgcaccacgaacagaccgacccagttttcggctcgacgcacgacctattcagttattcagttcaggtcgccaactgatggacttcgtccatgagccgactaaaccagttcttgtaaacatttttaaatgttttttgaataaatattcaaactgatttaattatctgactcgttagcaacaatgttttatctcgctgacaacatagactactatatcagctctacagcctttcgtcaactattaatctcaactgttatttatgaactttcataatctaaacagtcgatagtatccgcaatttatgcaaataaatgaactattaaacaaacaactcgcgcaaacaacataatataccgaaagttgatgcttattcacccacaaaatacactaaaaaaactttttataatcccaatttttttcaataaaaaaagcccgcaagcaaatcgtctgcttgcgggctttagtttaatcttaatcgttattattgttgtctggacgcattgttgggaataataagacatcccgaattgatgcggcatctgtcagtaacatgactagtcgatcaatcccaattccaagtccgccagtcggtggcattccgtattccaatgcttcgatgtaatcttcatcgattccttcggcttcatcgttcccattttcacgttctttagcttgtgcttcaaaacgttcacgttgatcgatagggtcgtttaattcagtaaaggcatttgcatattcgttaccgtacataaataattcccaacggtctgtaaaacgatcatcttcagcattcttcttagccaatggtgagatttcaactggatgaccatagatgaaggttggttgtaccaatgtatcttccacgaattcttcaaagaacgcattaatgatgtgccccacttgccagtatgattcatacttcacgtggtgttgatcagctaattcacgcgctgcttcaaccgtcattggttgccagaaatcgacacccgtcttttccttaattgcatcgaccatgtgaacccgtccaaaatcaccatcaagatcaatcgcttgtccttgatatgaaatctgaccagttcctaaaaccttgtgcgctgcaaatcggatgatcccttctgtttcatccataacgtctttataatcaaagtatgcagcatatgtttctagcattgtaaattcaggattgtgtttcgtatcaatcccttcattccggaatacgcggccaatttcatagacacgttccatcccaccaacgattaatcgtttcaaatgaagttcaagcgcaatccgcaagtacaagttgatgtctagcgcattgtgatgggtaataaatggtcgtgctgatgcaccaccagcttgaccatgcaagacaggtgtttcaacttcagtaaagccattgttatctaaatattcacggacagcagaaataatcttgctgcgtttcgtgaaccgatccaagctctctggatttgcgattaaatctaagtaacgttgacgatagatttgttccacgttggttaaaccatggaacttatctggcaatggtcgtaatgcttttgataggaaagtcaggtgcgttgctttaacagttaactcacccatgtcagtcttcataatttgcccagtaatccctaaatgatcacctaagtcagcctttttgaaaattaaatagttttcttcgccaacttcatctttacgcacgtaaatttggattttacctgaacggtcacggatgtcagcaaagccaactttccctttcccccgtttagacatcatccgtcctgcaattgtgacttctagattcttagcatctaaatcgtctttttcaattgcttcgaattcactgtgtaattccgcagccatatgtgttctatcaaaacgactaccaaaaggatcaattccttcgtcttttaacaattgtaacttttcacgccggacctttagttggtcgttcatttctctttgattatctttttgtcccaactgacaattcctccatacattcaattatctactaatgttgattttaacacgaaaacaccaacataaggaacctaatttgccattctcgcttcggtttcttctacaaagcggtctaaaatatcgccaacggcttgttccgtttccacttcgttaaccgccgctttggtcttagccgcacgaggaatccctttcaagtaataggcagcttgttgtctgaattcacgacaagccacattttcacctttaagttcgactaaacggtgtaattgtaacttggccgttgcaattttttcccatggggttggttcagcaatcaattcacctgttcgtaagtaggtttccacttggcttaaaatccatggattaccgagcgcagcccggccaatcatgacagcatcagcacccacttcgtctagcatacgtttagcatcttgtggtgtccggacatcaccgttacccataaatggaatcgttaattcagatttaacctgttttaaaatgtcccagtctgcttgcccggtgtacatttgtttccgtgtccgaccgtgcattgcaagtgctgaagcaccagcacgttcggcagcaagtgcattttcaacagcgaaaatatgatcttcatcccagcctgtccgcatcttaaccgttactggcttcttcacggcatctgtcacgtatgagaccatttcataaactttgtttggatctaataaccaacgcgcgccagcatctgtcttaacaactttattcactggacaacccatattgatatcaataatatcagcttgtgtatgttgatccacaaatttagcggcttccactaaggtgtcttttgaaccaccaaaaatttggatgctaactggatgttcgttcggatcaacaaacatcatccccattgtcttttgattattgtgcataattccgcgatcactgatcatttcacagaccactaaacctgcgccaaattcctttgcagttacgcgaaatgctgcgtttgtaataccagccattggtgcgacgactacttgatttggaatcgtcacgtctcctatttgccatgtcataatgccaacccattcccttcgtgtcttccgacaatatccaaattatcatagcaaaaaaatagtattcaggcaaaaatttgcgactattctattgcgcggctaaaattgcctttagttctgcttctgtaaattgatattgcttgccacagaaacgacaaaccgcttcagcaccgtggtcttcatcgattaattgttgtaaatccgctggcgcaacagaactgagtgcctttgcaaaccgatcctttgaacaatcacattcgtatttaacaggtattttttctaacgtcttcattgggagttcgcccacaatttcagtgataatttcctctgggctcatcccttgttggagtaattcagacaccagcggcatttctttcagccgcgcttctaagatatcgattaaccggtcatccgcccctgggagaatttgaatcatgaagcccccagcgacaccaattgagttatcttcattaacgaagactgaaacgccaactgcagatggtgtttgttctgatttagcaaggtagtaagtaaagtcttcacctaattctcctgataccaatggtacttgaccggtaaacggttcttttaagccaagatctttcgtgacactcaacgtaccagttgtcccaacgccacctttaacgtcaattttatttttgtcgttcaatggtaggttaacgtgtggattcgtcacataccctttaactgtgccttgcgcattcccatcgacaacaatcttcccgactgggccgtcaccttcaactctgactgtcatcttcgtatcaccttttaagccagcggcactcaataaaagggtgccgacaatcgtccgcccaaacgctgctgatgaagttgaccatgtgtcatgtttttcttgcgcatccgttacaacatcagttgcgttcactgcataagcacgaagttggccatcttctgaaatttgtttaattaaataatctgtcatctaaataacctcttttatggattgatgcaaaaaggtcgaccactaatcgtgtcgacctttttggtgtaacaatttatgcttcatcgtctggatgttgattatcctcagctggtgtcgattgatcatcttcatcaggtgtgattgtcacatcctttttatcagtttctttttctgaatcttcttttgcggcttcttttgcttcaagcgccttcttagcttcttcaaaagtagctgctttttcgcttgggaattcttcagcgttcttttctggcatcttaccatcattgaacaagctcaagatttctttttcgtttaatgtttcgtacttcaagagcatttccgcaattaacttatgttgttcacggtgcgcttcaataatttcgtgtgcttgttgatgtgcttcgtcaataatccgacgaatttcactatcaattgcagccgcagttgtttcggagaaggctgggccttgaccgtaagctgccccaacgaatggttgaccttctttttcaagggccactgtcccgagcttatcagtcatcccatattgagtaaccatcccgcgggcaatatccgttgcttgttcgaaatcgttagaagcaccagttgattgagagttgaaaataatttcttcagctgtccgaccaccaagtaacccaacaatttgttctgttaattctttcttactcattaagaactgatcattcttcggtaacatgatggcatatccgccagcacggccacgagggacaattgttaccttccgaacaacacgagaatcactaagaactaaaccaatgatcgcatgaccagcttcgtggtaagccacggtttcacgttctttaggattaatcacgcgatcccgcttagcaggacccgcaatcacacgatcttcagcttcatcaacatcagaagcatcgatatcggtcttgctacgacgagcggctactagagcagcttcgttcaataagttttcaagatcagcaccaacgaaccctggggtttgttgcgcaatttctttcaaatcaacatcatcggctaaaggtttgttcttagcatggactttcaagatggcttcacggcccttaacatctggacgaccaactaggatcttccggtcaaaacgacctggacgtaaaagcgctggatctaagacatctgaacggttagtagcagcgatgacgatgacgccttcgttccccgtaaacccatccatttcaactaacatttggttcaatgtttgttcacgttcatcgtgcccaccgcccatgccggcaccacgttggcgaccaacagcatcaatttcatcaataaagataattgatggggctgcttttttggcttgttcgaataaatcacggacacggcttgcaccgacaccgacaaacatttcaacgaagtcagaaccagagattgagaagaatggcacacctgcttctccggcaacggctttagctaataaggttttaccagtacctggaggtccttctaaaagaacacccgctggaattctagcccctaatgcagcaaacttccgtggatcttttaagaattcaacaacttcgactaattcttgtttttcttcttccgcaccagcgacatcagagaaacgtactttattagctttcttgtcggctttttgagctttggacttaccaaagttcatcatccgaccgccttgaccgccaccttgacccgcttggcccatcatcatgtagaataaaccaaacatgatgatcaatggcaatacaagacttaaaatacttacccaccaaccagattgtggttcttgaagggtttcaaccttggttgctgatttgtcagctaacttggtcattgccccaacttgtgaatcactttgtaataaggttgttgtgaagtgtttaactgatcttgcttttgttttttgtcctaaaagattctttttaggctgttctgttttttgtgctttacgatattctccagaaattttataaataccattcgttggttgaattgagaatgacttgaccttattggtcttcaattcacttaaaaatgtacttgattgaacttccttagactctgatccagcgttaccgttcatgaagaacgagaacacaccgactaaagccactaagataataatgtaaaacagactattactaaacagtccattctttttgttgttcatacgtgacctcctgaagcttctcatcatttgtgacacagtgaccttttgatactgttaaactataacatatctgacttttattgaccatttatttacccgaataaatttcaggtttcaaaacgccaattgttcccatatttctgtatcgttcggcatagtccaatccgtaccccacaacgaattcatttgggacttccatcccaacataatccgaatgaactggcacaattcgacggcttggtttgtccattaacgtgcagactttaattgagtttgcttgacgtgttttaagaattgccattaagtaattcaacgtgcgcccagtatctacaatatcttcgataatgataatgtcgcggcctttaacactcgtatctaaatctttgatgattttaacttcacctgacgagatggtctcagcaccataacttgacacatccataaagtcgatttcaacatggaggtcaatttcgcgaatcaaatctgtcatgaagacgatcgcaccctttaaaataccaattaataacgggtttttaccttgataatccgctgtaatttgttttcctaagcgctgattaaccttttgaatgtcttctcttgaatataatacgcgttcaatatctttttctaacattgtgccagcctccgtaatttgcttaatcatctaaataacatagtatgtaccgtattttaccagtttgttcgcgattaaacaacgccgaaatccgtaaatccggccggccaagcaattgatttggggtccaaaccgcccatgcattttggcgctttgcctgtggggttttagtatcaatccataaccgttgaatggttttgtggtgtgccttatcaagcattattcgatctgttgcttgtagcgccctgagttgcagtggccattcctctggtgctaaccaaacgacctgttgccgttgaacttgattaggtagatggtcgatatcgaaaacaccaacttgttcgccattttttaaccgcagccattcattaatcgctaatgttcgtgttttgaccaaagaatccactatttggtggacaccaatccgaaaacaccgatactgcttttcaaaaatgatgccattgttcaatgccacttggccttgcggtttctgcgggttcgccaacaattgttgcacttgcattaactgggctgcctttaacgccggtaaagtcttgaaatatcgttgccacaccaattgccagagcgccctttgttgtgtctggttcaagccatcgagttggtctaaacgcccttcaattgccgccggctgttttttgattgccaacaatggcagtaacgccgcggttagatcatcttggtgtgccaccatttgggtcagactttgactgaaccgattggcattttgaatcaagtgtggattttctcgttttaaaagtggcaccaccgcatgtcgcatccgattacgaagaacagtttgttcctgattggtttgatcttcgtaatacctcaaaccaatctgatcagcgtaatcacgcagttgttgcttactaaaaggtaatagcgggcgaattaacgtccccgttttaaacggtctgacttgccgaatcccccgcatttcatgcaattcaccgctacgaactaatttcatgagcaaggtttctagttgatcgtcgccgtgatgcgcggtcaccaagtaatgcgccgattcggttcgcatgacttgatcaaaaaaagcatagcgaaattgacgtgccgccgcttcaacccctgtttcaggatgactcgcttttggccaatgttgaatgcgtaacgggatggcatgcaatcggcaaaactgggttaaatatttttcttcagccgtactttgcgcacgcaattcatgattaacgtgagccacaacgacttggggtcgttgtttttggggcagatgagtcaataaccacaataaaaccattgaatcgactcccgttgacgttgccaccacaaccttgtcgccggcttgccagaactgctctttttgaagatgtgtttgaaatgcttgttctaacataccgattcctctccaacacagacttgaaatgaaataaaggttgccccgaaagtctatcactaaactttcaagccaacctttatcaatttgttctattaactgcgacggccgccacggccaccacgtttaccttctgtattccgtttaatcgttgataagcgatcttcactatcttttaagaaccctgataataaatcatcaaagccttcttttttaggtgcgcttgaatgctctggtttgcgatatccaccgcgattattatttggacgactttgagggcgcggatgttcttgcactttaggttgatcaacggctttgcggattgataaaccaatcttaccgttttgatctgacataaccttcaccgtgacttcatcaccaacggttaaaacatcatgaatatctttgatataactatcggacacttcactaatatgtaccaacccggttttgccttcacctaaatctacaaaagcaccaaaattcgtaatgcccgttactttaccagcaacttttgaaccaacttcaactgccatataaaactacgtcctcctaaatggtcgtttgaactcgtcaaacttttaatcacttaagcgtgatatttaataaaataagtatagcacgctttgcccttgaaacaaggtcgtattctgaattatttttgttgctaatttaaattaggcgccttgtcttggggcaaactgaagatggtttcaccgtctttagaatagtaatacttgtaccgaatgtatttggccaagtaatcattatcatgcagctgttgcacttgaatctttaaatcagattcagttgctttagctttttttaatgtcttttctttagctgccgttgtttctctaatctcggccaatgaatgatgggtttggaaaatctgcacaccacaaattaagacgactaatactgcaacaatccccaagccacataagcggcgtttatgaacacgcttaacatgggctgccttgtcttgcacgattttctgggctgcttgttgctgggtaaatgcattctcgattttcgcaatttttcgactcacttagaagccccccatctcggaattaagttcattatagcaatttcacaaaaaggtcgtcaactaagatcccagattcttaatgacttttattaagatgctcaacaaagtcacaaaaaaaagcaccggcccatattaattcggccagcgctttttccttaatcaaagttttcagcttgtcttgtttccaaaatttcatacatttcagctgcatcgcttttcttcgtagtttcgatgatctgtgtaatgcgtacgaccatcgttttattaccaaatccgatctccagtttatcacccacgatgacattgcttgaagattttgcagggcgatcattaatcatgattcgacccttgtctgcaatttctttcgcaactgaacgtcgtttaatgattcgtgatactttcaaaaatttatctaagcgcattattttgtcctaccttttatttttttcgaaaggcgcaatagttgccggccacctggcatcgtcagccattctcgaatcgagaataattgccaccgtaatgctaatccgccaaataggagcacaccaacgagtacgccaaggcccgtccctaaaatcgcatgtcctctggaactaagtgattgtggtgcaaactgtagcgcaatcttaacacccagccacatcactgcacaaatcgcaagtaacttaccggtaaagcgttgcaaaccaagcgcttgccgtacaatcactggtgattgccgtaaaattaaggctaacacaacaccgaggctgataacagtcccgacactcgcgccaacaatttgatagtgttgcacaagccattgattgattgctactttaacgattaacccaacaattaaggctgccgttgttttatggaactgatcaagactttggagcaccgagttgcaagcattgatcagcgcgatgattgcgatactcaacatataccaaaccaatgcctgattaccatcagcatccccgaataagaaataattaatctgcggcatcaaaaccattaggccggtggttgctgctgccgataaacctaaactgatatgaatcagcgcttcagcaacttgttgaaattgatattgttgccgccgttgccgcgcttgtgacagactcggaatcaacgttgatgagaaggcaagtgacacgactaatcccagctggacaagtggttgcccacggtcaaaaatccccttcatattcttagcaagttcttccgataatccactgaggaccaacccttttttaactgtgaaggaatcaaccagctgtaataacacaattaatgaagcaaagaggcaaattgacccgccttcaatcgctaagcgttttgccaattgttgatacgccttaaaatcgatgccaccacggtgtggcgccttgagttgaaaggcggtttctgctggccgtaataaaatataggttgcaaccaagccgccaaagaaggcgcctgatatcgcccatgtgcccatttcatacactgaccagtgcagtttcaaagatagccacgctgccgccaagatgaccacgacccgcacgagttgctcagcaacttgtgaaaccgccgtcggtaccatattgaaaattccttggaagtacccccgcgtcaccgctagaaacggcatcaataaaaacataaacgataccatttcaatcagcggtgttaatgctggatccgccatcgcccccgcaattttcggcgcttgatactgtaaataaatgaagattgcagcaccaaagatgcctaacagtgcaaatgagcgtcttaacagctgcgtttgttcctccggattgacttgttcagcaaccagtttcgaaatataaactggaaagccactaagtgcaaacgtcatgccaatgccatagattggatagacttgttgatacacgtaaaagccggtgttaccgaccatattttgaaatggaatccgataaacggcacttaataccttcgcgataaacgacgcaattgataaaatgaccgcgcctttcatcagatgttgcatctgtttattttgcatgcctggcctccacttagcgtgcctaatccgttggttgttccgtgtgcttttgttctatcttcaagagacttgtaacaaaagttgccacttcactcaaccaatctgccggttgcatcttcggctggatgacgagtttcacgcttaattgttcttgttcaaacccgaccgttgctttcaagcgggttgtcgataacgcttcaaaaatttgttcacctgaaacaaggcgactgcccttcgccgataaggtgacttgaatgatttctttcgtttgtttgatggtttcgattaacgcgtcatctgcattcatcttcaactgaccaatcgctaataaattagcgacttgatctggataatcaccgaaccggtcaattaaatcggcctgaatttcatcaaaggccgcttctgaatccatctggcgaatccgtttataaatttcaattttttggcgttgatcattaatatacgcgtctggtaagtaagcttccagtttaagatcaatttcggcattcgttttagcaacgacttgcttcccttgtttcttagcgacggcctcacccaacatttgcgagtataggtcaaacccaacagaatcgataaaaccatgttgttgcttacctaataaattaccagctccccgaatcgataaatcacgcatcgcaattttaaacccggaccctaattcggtaaagtccttgatggcctgaagtcgtttctcactaacttccgttaaaaccttatcgggtttatacataaagtaaccgtaagcaatccggctactacgtccaatccggccgcgtaattgatagagctgtgaaagaccgtaatgatcagcatcttcaacaatcatcgtattgacgttaggcatgtcaaccccggtttcaataatcgtggttgtcaccaagacgtcgtatttaccttggacaaagtcgtagatgacaccttctagttgtgcctcggtcatctgaccatgtgcgaacccaaccgttgcttcaggaaccagcgcttgaatctcatcgaccgtgcgttcaatgtcactcactcgattatggaggtaaaacacttgaccattccgttctaattcccgttcaatcgcttcacgcatcgcaccggcattttgttccatgacatacgtttggataggatagcggttagtcggtggcgtttcaatcacagataaatcacgcacaccgagcatcgacatgtgtaacgtccgtggaatcggcgttgccgtcaacgttaacacgtcaacttgtgccttcaactgcttaagtcgttctttgtgttttacaccaaagcgttgctcttcatcgacaatcaacaagccaagatctttaaacttgatgtcttgcgataacaagcggtgggtgccaatcacgatgtcgactttgccctctgctaagcctttgagcgttgccgtcacttctttgcgcgttttaaaccgtgacagtaaaccaatttcgaccgcaaaatccgcgaagcgtgtcagcatgttttcataatgttgttgcgccagaatcgttgttggcactaaaaaggccacctgtttaccggcttcaacagccttaaaagccgcccgcaaagcgacttccgttttcccaaagccaacgtcgccgactaataatcgatccattggacggacgcgttccatatcatgcttgatttcagcggtactgcgtaattgatcatctgtttcaggataggggaactggccttcaaattcagcctgtaattgatcatcttttggaaaggcaaatcccttttcagcctcccgttgcgcataaagttcgattaaatcatcggcgatatcttcaatctttgccgaaactttactcttagtcttttgccactcgccaccgccaagcttattaatcttcggtgttttggcctcggcagagacgtatttttgcaccatattgagttgagtgactgggataaataacttcccattatcccgatacaagatggtgatgtagtcttgatgaaccccatcgacttccaaggtttccatgccgacgtattcgccaatcccatgattgacgtggaccacgtaatcacctggttttaattcgttataactctttaaccgttctgcattggccaaggtttgccgccggacttttttcttcggcgccgtattgaacagttccttttcagttaagaccaccagttttaaatccggtaattcaaagccattttgaagtgacccttgaatgatttgtgtccgccccgtctccaactgagtcttattggcgatgacggcatcaatttcaaagtcgtggaacgtctgatcaatcttcttgacccgtttaggatcagacacgagcacaatgaccgtttgtttttgcttttgccaatgcgcaatctcggttttcaaaagcggcatttggctaaagaattgttgcaccgtccgcgtgggtaaattgttgagtgcatcgagttttaacttccccattcccttttggaacagtgatagatagagatgcgcatgtgtatcttttttgatgagcgcttgggcatccatcatgagtcgttggtctggcaacatgcggtgggtttccaacatatcggtttgccagttggccgcttcttcagtcaaaatccgctgcgtttctaaaatgcgcggatagtcatcaaaaatcactaagccactctttttaaagtaatcaatcagacttgattgatctggatacagataatcaacaaacaacgctaaattctcaacgcgttcaccggccaacaaccgttcaatcggtgtttcaaagtttgtcgccaattgtttttgttcagttttatccgttattttggccgcaaccgcctcataagctgcttgtaatgcctcaccagccatttccaattgtgctgtgttggccaataagtcagtcgccggcataatttgaacactatctaaattctcaatactccgttgcgtatctgcttcaaaagaacgcagtgaatccacttcagtatcaaagagttcaatccggaccggattttccgcatccagtggaaaaatgtcaataatatccccccgcattgcgaactcaccaggtttaccaaccaacttatctcggaaataacccatttcaccaagttgcgcagcaagtgcctggggatcaacttcactatcggtattgattgtgagttgactatcttgccactgacgcgctgtaggtaataaccgccgcatgcccgcgaccgatgtaatcacaattccttttttgcctgttgctaaaaaactcaacgttcgcacacgttccgctctggactcaggtgaactaactgccatttcagccgccatcacttcttcaactgggaaagtgtaaatctgatcactattgagtaaattactcaaatcatcagcaacttgattggcttggaacgtattactctcaataatcaataagggttgttgtttataaatcgtcgccaaaaacagggttttcgctgatcccgaaagccctgtaagtagttgtttaatccctggtcgttgattctttaaaacggattgcacctgtttggtctgccccagcattgtcattaaatccatgtaaaagttcctttactttcttattataatggcgcgaagaaacgtgctctgttttttgaaacgtactttttggttgcaacaacttccgcttaatctaaaatttcaaataatcctaaaacctcgattatttgaaatttttattaatgctctgttgctaaccgcaaccaaacgcactctgtttttgaaacgtgtcattggcagtagattcctgcgctttgctacacttttcaaatcgccgcttgcagcgtcaattcgccaagttaggcaaatgctcagaatctgaccaactgccaacgacactctaattaaacttattcatcgttttcatgaagtcgtcgttttggcaccagtcttctagtgcttcgcatgcctggtctagtgcttgattgataattggtgcgctgtctttgtcaaacggcgttaagacccagttaacgactgtacttttttgtggatgttgaatcccaactttgacacgcttaaattctgagctttggacacttgcgatgatactcttaatgccgttgtggcctcccgctgaacctttttgccgtaagcgcaacttgcctagcgttaagtccatatcatcttggataactactaattcatctaggttaacttggtagtatttcattaaaggcccgactgaacgaccggaatcattcataaacgttagtggtttcactaagaaaatcgtttccccttcatatttaaagctcccgtattcagcttcaaaatcatgcttgtttaaggtcacattaaaccgttcgcataattgatcaatcaccataaaaccaatgttgtgttttgtctttgcatacttactgcctgggtttcccaagccaacaatcattttcattattaacgtcctctttttgactggcgctatcacgcaaaaattctgagcagttaattctccccagtcgccagttgatattaagaaccattataccatattcagtttatttctctctttgtgaaagaaatagttttctgaaaatttaaccaaaaatcgcgaactttggtgtaaattatgctatactggttttcgaaatgaagaattgatttacagaaaggacgtcattatattggcaaacattgaaaaagatcaccaaaaagttatcctcgtcggcgacggcgctgtaggttctagttacgcttatgcattaactttacaaggtattgcacaagaagttggtatcgtagatatctttaaagaaaaaacacaaggtgatgcaatcgatttatctgatgcattagctttcacttctcctaagaaaatctatgctgctgaatactcagatgcaaaagatgctgacgttgttgttatcacagctggcgcaccacaaaaaccaggtgaaacacgtttagacttagtaagtaaaaaccttaaaatcttgaagacaatcgttgacccaatcgttgaatctggctttaacggtatcttcttagttgctgctaacccagttgatatcttgacatacgctacatggaaattatcaggtttccctaaagaacgcgttatcggttcaggtacatcacttgactcagctcgtttccgtaaagacatcgctgaaatggttaacgttgacgcacgttcggtccatgcttatatcatgggtgaacatggtgatacagaattccctgtatggtcacacgctaacatcggtggtatcaagatttctgaatgggttaaagctcatccagaaattaaagaagaagaacttgttaagatcttcgaaagtgttcgtgacgctgcttacacaatcattaacttaaaaggtgctacattctacggtatcggtactgcattagctcgtattactaaggctatcttagacgacgaaaatgctgtcttaccattatctgtatacatggaaggccaatacggcttgaacgatatctttatcggttcacctgctgttattaaccgctcaggtatcacaagcatccttgaaattccattgacagaccacgaaatggaaagcatgcacagttctgcaaaacaattaaaagatatcgttacaaaagcatttgctgaattagatatcgaaactcgccaataagctctttgctgttggtcaaacgactctcatttaatgagagtcgtttttttatggtgttaatattatcaactacatattttttattaaaaataatacttttttatttctttttgggtgcatatcttgtatgctaactattagttaacgcctttgtattttatgtgatactggggtatgattaacctatgcagagattggagttgaggttgtgaaacttacgaagaaagcctacgtcgcccttggcgtagcagccgttatccttgttggaggttactcggcagtcagtcttcattatcaaaaagcattcttgccacatacgaccgttgccggtgtcaacattagtggccgatcagtcgcagacgctaacacagaactcttaaaaaaagtgaatcgtcaaaaatatacgctaaaggataacaatcaaacattgctaacttttagcggtcaagaagctggctttagccataattttaaaccgttattggaaaagattaaaaaaagccaaaacggttggtcttggctaggccacgtttttgccagtgaacaaacaactaaatcagaagacgcactcattttaaatgccgctgattttgacaaattctcaacggaaaccctcgaaaaggtcaacgctaatcgcaaaccttcagagaatgcccatattaacctcgagaatcatcaattcgatctcgtaaaagaagtctacgggaacacaattgatgccgctaagttcaaaaaagcagttgcccacggcattaaccaaggtcaagcaacaatcgacttaaaaaacgattatgcgcaacctgaagtgaaatctacagacaagcaattgaaaaaaactgccgatcaattgaagacgattgctaatgaaaaaatcagctattcagttaatggtaatgatttccaagttcctaaagaagacatccaaagttggttaacgtataacaacggtaccattagtctagataaagctgcccttaccaaatacgtttatcaattaaaagcaaagtatgatacttttgacaaagatttgaccttcaattctacaaaagaaggcacagtcactgtcccagccgggatttatgggtggagtatctctcctgccgatgaaatcaacgccttaatgacagaagtgcctaagggcaaagatttctcaagaacagctgttatccgtggttccggaactgatcagaaaacgcgtagtgtcggttcaacctacatcgaaattgatttaaaagcccaacatatgtggctctatcaagatggtaaggtcacaattgacactgatatcgtttcagcacgtccaccacaagtcaccccaaccggtgtttggagcgtttggaagaaagaacgcaatgccacattgaaggggaagaactttgatggggtcagcgaatacgcaagcccagttaattactggatgccaatcaatgaaactggcgttgggattcatgattcgccatggcaacctaagtacggtggtgactggtataaagaacacggctcacacggctgtatcaataccccacctggcacaatggctaaactctacgatactgttagcgaaggcattccagttgtagtgatttagacgtagtgtactagcaacacctctcctctacggattaaccagaggtagctgacctacagaattcgtttagaaaaagtaagctcaacgattaaataaaaagcagggataaaattaacttttatccctgcttttttattgcttagatttcacgttctttctcatcgattactaatcaagttttcgctgagtcgaaaaactagttattttaatctgcttggtggtatgatatgattacattagtatatgagagaattttaatctaaggagaaagcctatgctcattaaatccctagttttacctaaagaacgtctcaccacaattgttgaatcggtgaccttagaagaagcattacagctactagaagagtctggttaccgttgtgtgcccgtcctagatgctagcggcaagattttccgcggtaacatctataagatgcacatctaccgtcataagtctcaagggggcgatatgcagcttcccgtgaccagtttattgaagaatatgaccaagtatattccagttgacgcaccgtttttcaaagtattcttcaacattaaagatttgccatacatcgccgtattagacgaagatagcaatttttacggaattctcacgcatagcacgttattaaatatgctttctgaagcgtggaatctcgaattaagtagctatgtactcactgtgctttcttctggtgaacaaggtgatttggttgccatgtcgaagattatcgctaaatatacctcaatcgccagctgcatcaccttagatgctaagcaagatgaattcgtacgacgcacccttttcaccttgcctgctggacttgatcttgagattttgaaaaagattgtttataagctcgagaaaaaaggctatcgtgttcctgaaatcgatgatttacaatctgataaggcgctccgtgatgactccaaacttgatgatttagtttaatgcaaaaaagggcagtcctaattaggactgccctttttaatctttatgatttcatttgtgcatcaaagtgcacaactttatccacagcatacattactggtgcggtaatcaccatgatgactgcttctgaaagtgccaacgaaatatacgttggccagaatggaatgtgtgtgctagcagtagaaccggttaacacaatcatccacgcaatcatacacatcgaaacggtgaacaagagaatattgaccaccattttttgccaagtttgttttaaatagggcatcacaagcgttaatacaagcagcgccaataaagtttgcccgccaccaaaaagcgtatcgagtaacttgttttcagaactgaaaaagaaattgaacactaataccccaccgaaaacaccccatagatatttcttattgaagaccactaaatggtttaagccttccgaaattctaaattgaatggctcctgaagcaaatcccaacatacctgggaataacgataaaacaacgtataatgctgccactaacccgtttagaatcaccgtttttaatcgactttgattcgtcatctttgaatcctcctagtttttttgcgtgggatggttacgaaccacgttttttcgaacagctaccatcatatcatatttaccggctgttgataaaggtcaaaaaaaagagaacccgcttttataagcgggttctcttcattctttctttttggtatttatgtattaaggatttaagaccgctttaagtccaacactaatggtgagcgcccgatcgacttgtgccatcttatccgccactaaatgtgtgacgcgatctttcaagcgttgtttatcaatcgttcgtacctgttctaataaaatcacggagtcgcgttcgacaccattatccttggccgtaatcccaacgtgtgttggtaatttcggtttttgaatctttgctgtaatcgcggcaacgattacggttggactatggtgattacccacatcattttgaatgattaaaacaggacgcatgcccccttgttctgaaccgaccactggtgataaatccgcataaaaaatatcgccacgctgtattaattctcccacttgttctccctccaattaggatcaatcaactacgcgaatgtgtgcgtacgcctcactttcgcaagcgttaaattcagccgcaatttgactgttgatgctagccatctcagcgtacccgttaatgacgttatctacttttgactgtctggtcgccatgaattcgtgaagcgcatcttgaatcaaatcactctcatcaagggcatacacctcacaatactgcttaattgcttggaccaactcaacgtctaatttaacggatagttgttcacggttagctttcatctacatcaacctccgaatcaacactttaacctttattcatcctaccacagaactggcgataatcaaattcttaatccttaatgttcatcaattccactgtaaacccgtggtaaccgatcagataaaccacagataatttcatagtgaatcgtccctgcataatctgcgatctcttgtaaagtaatttcgtcatcaccacttttaccaacaaaaactactttggtccccactggatattgcttaggtaaccgaatcatcaattgatccatgcagacccgaccgacaatttcacaccgatgtccatccaccaaaacggttgagccttgcatccgtctagaccaaccatcggcgtaaccgattggaatcgtcccaatccattcagattcactcgcttcataagtcgcaccgtaaccaatcttacttccggcttcaacttgcttaacaaagaccaattctgattcaagacttagcgccggtttcaatgcataaggcaattcaggaatcgcattccctgaaggattcaatccgtacatactaattcccattcgaattaaattctcattgcaagctgagtgccataaactcgtggctgaattcgaaacatgcacaaatcgtggacattctggtaacacggctactagttcattaaaccgggcactttgttctttaaaataagtatcatcgggatcatccgcagttgcgaaatgggtaaaaatcccttctaaatcaaaatatttcgcatgtgctttgataaatgtggctgctgctagtaattcagtcgcatttctaaaaccaattcgccccataccactatccacactcaaatgaatgtgcattggttgtggataaggtatttgttgggcaatttcgtaagcagcttgcaaccattcgagtgagccgaccgtaatggagatttggttggcaatcaccaattcgatttcggtgggctgtgtaatccctagcaccaaaatgggttccgtaaagttagcacgccgtaaagctaaggcctcatctaaaatagccacacaaaatcctgcagcaccagccgcttgggccgcttctgcaacaggaatcatgccatgcccataagcatttgcttttaagacagggaaaatcactgcatctgtgccttttaaatcctttagttcattttgaatattttcataaattgcgttttgatcaactagaatgcgtgttggtcgtaagtagccgactgtcatcgtctcaacctctttccaaaataacttctgccatcactaacgtcgttgtatgcgaaagtgatacgtggacagttccctcaaataaatcttgtttgatgtagggtttgccctttgcatcatttaacgtttcaatcgcttgcagttgtacctgtccaataccagtcccataagctttactaaaagcttccttcactgcaaagcgccccgctaaaaattctaacgcacggcgccccgtataccgtttaaacagttcatattccttagctgttaatactttttcagcaaaatgactattcttactctgtgctttttcaaatcgatcaatttcggctaaatcaatgcctaatccagcaatcatcgtcttcgcccctagtaccctatttttaattagtttaccacaaaaaagacagagactgaacttacatctctgtcacaattgactatatgaaaacagcggccgaccaagttggccgcccgctgtttttaaaaagtcttatttatcgtttgtacgaattgtgaagttccgttttgaacggccatcagtcttcttacggttgtcacgattgtcattgctacgacgtttgctgctatcgccgttgccactgttgcgacgaccgtctttgttgtcattaccacgacgtttgccatcgccattaccacgacgattgccaccgcgatagccgccaccgttaccgccacgacgattgccgccgccattccggttgccgctacgattgccaccttttttacgtgaaggcaatggacgttctggtgttatcttaacaggaactgattccttgctgattgtcttcaaaagcactgaagctaattcaacgtcagagaattgtttcaataattcttcagcttcttcgctgaatttagccaattggcctttttcaatcattgagttgatgtctgcaaccgctgcagctaattggcccttgaaggcttctttttctgtaggtggttgtaatggtaacatccgtttcttcgttaagttttcgatgatgtgtaagtattccatttcgtttggtgttacaaaagtaactgaaacgcctgacttaccggcacgacctgtccggccaatccggtgaacataactatcaggatcttgaggaatatcgtagttataaacatgggtcacacctgagatatcaagaccacgagcagcaacgtctgttgccactaagatatctaaacggccagccttaaatgatttcaagacgctcatccgtttttgttgtgataaatcaccgtgaatcccttcagcattgtaaccacgagccttcaaaccgcgtgttaattcatcaacacgccgttttgtccgaccaaagattaatgttaattcaggtgattgaacatcgaataaacgcgtcataatgtcgaatttttcgaagtcctttgcccgcacatagtattgatcaattaagtcagccgttaattcttttgacttcactttgatcatttcagggttagtcatgaagctcttaccgattttcatgattggtgctggtaatgttgctgagaataaaagtgtttgacgttggtctggcacttgtttgatgatgctttcgatatcatcaacgaagcccatgtctaacatttcgtcagcttcatctaagaccaatgttttcacgtggtctaatttaactgtgcgacggttgatatgatccaataaacgaccaggtgtcccaacaagaatttgtgggtgatcttttaatgagcggatttggcgacgaatgtcagccccaccgtatacaacttgcactttcgctttacggtcgcgacctaagcgataaagttcttcttgtgtttggattgctaattcacgcgttggtgaaatgatcaatgcttgaatgttaggattgtctaagtctaagttttgtaagattggtaaaccaaaagcggctgtcttaccggtaccagtttgtgcttgaccgataacatccttaccagctaatgccaatgggattgtttcgccttggatgggtgttgcttcttcaaagccagcgcgttcgatggctttcataattggttctgataaacctaattctgcgaatttcaaatagtgttcctccttgttttgtaaaaaacatgccattacaaaacaggtccacttcgtcaattgcaccattttcaaaaatctgtcttgtaatataattgttttcaaaagcctttttcattaaaaaagctccttaatagcttatcatgccacaacttaattagcaaacggaattgctccaattgttaatctaattccatagcttcaatcgctaaacagcgtgcctgtgcagttgtctgtcaattgctaatcattaattaacttcagtatcttgtaaagcagcgactactttttctaaatgtaagccatgacttgcctttaaaacgattaaatcgtcaggttgtacctgcgcttgcaagccagcaattaattgcgtttgttcatggcggttaaagtaatggaggcgttctggtgcataacgctcttttaacgtcacatataatggttcaatttcatccccgaacaagaagacctcttgaatcatcgtgggatctaattcttgggccaaactttcgtgtaatttcttgctggcagtaccaagttccaacatgtcgcctaagacggcaatccgccgcccgtcagtctcaaaatggctgaaattgtgtaaaacttctttggcagccgttgggtttgaattgtaaacatcactcaacatccgttcacccttttgaccaacaagccactctgtccgattacttgtgacttcaaaattcgccaaggcttttttcattaattctggtttaatatggaaccgttgcccaaccaaaattgcggccaacgcattattgacattataagcacccatcattggaatcgtaaacgtcatctctggccaagcattcaacttgaatgacgtttcagtttcacctgcacggacttgtaagggatataagtcattggtcgtcaaattaccgaatgtctcggttgtgagttcgccaacccgttcagtcaatagcggttcgtcgccagcgtaaattaatagaccatcttctttgagcccatctgtgatttccatcttagcatcggcaatcttatcacgcgtcttgaaaaattcgatatgggcttccccgatcatcgtaatgactgcgacatctggcatggctaattcactgagcgcttttaattgacctgggcgatccatccccatctcaatcactaaaatttcagtattagcttccatcgataaaatcgtttgtggcacaccaatttcattattaaagttagcttgtgtcttgtgcatattgtactgactacctaaaacagcagctgtcatatctttcgtcgttgttttaccattactaccggtaatcgcaaccactttgggattaattttttggagataatgcatggctaacttctgataagccgctagtgggtctgtaaccactaatacaggaaaatcagttggctgtgcatcatgattggcagcccaaaaagttgccactgccccattttccttagcttgtccaacaaagtcgtgaccatcacgcataccagctaacggtacaaacaaagcgcccgcatttaattgacgtgcgtcaaacgcaacattcgtcacttcaatggttgcccattgttcaatatcgtttttagccccagtgactcgtgcaatttcacccaactgcattttcatatctcaataactcctattactctgtgtgcatttttacgcacgctttttttagttatggcttaaaatactacgcaatattgtaccatagtttcaaaaaagccccaaaaatgattgaccaccaattaagagtaccaccgtgaatagtcatcaacctgtttatcatttggtcgatattgttgcttagtcggactccgccaccctttaaaagctgttttgcgtagtgcatgatcattttgcagcggtggttggctatctaaccgggcgtgttgccgatcattccgattagcataattaaacgattcaccgtttagtagttgccggagtgtgccatcatctagctggtaatggtcaggattactatcaatcagaccatccgcctttactttaagcacttgccattgactgataaatgctccagatggtgctagaataaattcactatgaaaatccggcgtgagtcgttttcgattccaatgcgttgttgggcgctgtccgttgcggtatttattatggagccgagctggttcacgccgcagccaataatgtggctgggtcgcttgtcgttttcgcacaaaccgcgctaaggcttgttcatctgtttcaccagagtgttgaaaataatggcgaatatagcgtagattctgccgatctaaatacattctgaattgatgaatccgtttatcggttaaaactcgaccgacaaatgcacgttgcacactttgcgcaaaggttgctaaaaaaggcgcatctggtgctaattgcgggtcaagttgataatcacgtgctgttaattgcaaaaacgcatgctcatccaactgcgcccctaaatgcgtgagcactaaattgatccgctggtaattaattactggttgtgcagttcggtccccgtatgcttcaaaaagcatttgataaagtgctgagcctacttgatgtaatgcttgccaattgtgttgcaaaatccttttaagcgctgttggttgcgcagcaagttgtcccgttaaatgggttgcataagcgcgtaaactcgcaacgtcccaattagcgcgttctaactgttcaaaatgggccaccacctctgcctgatcaacaatccgataccgctgcggtagtgtttgccgccaaagatccattaattgagtgccatccgttttagttgccagcgttgtgatgatggcgcgttgaatcattgtgcgttgttgcgtcgataatgttagctggtgacgcgcatgcaatgccaataataattgcccacgcacaaccggtaaatcaatcatggtaatctgtttgctcggtgtctcattcaattgcattattagagtagattgtaacgccattaactgctggattggggataatcgcacactgatcactcctcttttcctttattatacaaaaaaagagagggacaaaaatgaattttgcctccctctatataaaacgtgttctatcaactattacctacagctgatgcgttatgtctttaaaacattacatcgctcttaatttagcgactcgttcttcaatcggtggatgactatcaaataaatgagtacccgaccgactaagtcctttaaatggatctgagatatacaaagctgcgcttgatggatccgcagcttgcattggctcactgtcagaaatctttaataacgcattgatcaaaccttgtgggttccgcgttaattcgacaccagatgcatcagccaagtattcccgatttcgcgacaacgccatctgtgcaatactagccgccaaaggtcccaatatcaacaataggatcgaaaaaaccaaaccgatgatattacttgcaccttcttcacggtcgttatcacgactgcggccgccgccccaccataacatgttgctgccgatgttcacgagcattgaaatcaccgcagaaagtgccaaggcaatcgtttgtaaccgaatatcgtaattgcgaatatgggagacttcgtgagcaattaccccctcgagttcctcccgattcaaacgcgccatgatgccagtcgtgaccgccaccgcagcgtgttgtggatcattgcctgttgcaaacgcgtttgggctaggatcgtcaacaatgaaaacccggggtatcggtacttgggcgaccatcgccatgtcttcaacaatgtgccataaatcaggatattcgctagcatcatggacttcggtcgcatgattcatctgcataacaacgttggttgagtttccaatcatcatcgccatataaacggcggctaaaatagccgccaccacgacaccactaatcaaattacgcataaacagataccctaatgcagccccaattgccaatactaaagcaaaaaagccaatcatcacatataccgttttacgtttgttctgttgaatttgttcaaataacattcccaatcacaccctattcaaaggaaactttaggtgctgctttttcctcaactggcgtttctaagtaagctgtcttttggaaattgtgagcacctgccaaaatattaccagggaaagtttgaatttggttgttgtaacgggtagcacttgagttaaacaattgacgtgcatacgcaattttattttccgtattcgtcaattcttccattaacttcgtaaattctgcgtccgcttttaaatctggatagctttctgacaaggcgaaaacgcttttcaatgaatccgttaattgattagaagccgccattgttgcttgccgattatcagctggcatttcaaccaattgattccgcatcttgatgactttttccaacgtgtcttgttcatgcttagcataacctttcacggtcgatactaagtttggaatcaagtcattccgccgtttgagttgtacatcgatttggctccatgcttcatctgtccagttccgactcttgaccatgttattgtaggtgctgatatagaagccaaccgcgccaaccactaacaaaataatgataataataaaccacaacatacgcgtatcctcttttctttaatgttgtcttcatattatcagactcgctacaacaaataaagaataggttgccaaccttaacaaaaccttggtttgacataaatggtaaaattaaagagttaccaattttgggagggatacttgcatgtttactgcacagccagcaattgcgaatgttgatttaactgcaccacggatgattgtcgatgaccctcggattcccatgagttatcaggcactttgtcaaacaaccaatggcggttttttgactaactttagccttcctacgagtgagccaacaagtgatggtctcgccgacgttgagtgtcattatttagctgggattgctcacaacggtgaagcagtcatccaagcccccgacttgcccgattacttagtcccttttagtcagcatcaacagcagtactttgtatttgattgccaacaagcctcagctgaaccaccgattcgctacatagatactgaggtcgatcaatggttaaccgttgctgattcgctggatagttttctcgaacaattaggtcccaaagtaattgatctaaatccagataatgagttaacccctttgcagcgtaaccattacttgttagtggcacagggagcacagctagacactttgctagcccgttatgaatccgatgctgataaagaatggctgtttgattggctactctattttgccgaacacggtacaccagcccaacaagcaagcgcattgactgcctacgacactcagcggttgtactttaaacgccagctgccacgagctaaagatgcgcaactgactgccctctttgaacaactcccacacttaaaagacgcctaccacgcacatcagcaagcgtggtcgccgctttaactttttagaatcgagatgatgacaccatgttgactaacattcgtcaacgtttattcagacgccgcgcacaatgggaacagaacctcgtcgttttatggtttggtaatttcatggccggggttgcttttagtttgattatgccatttatgtcgttatacattgacacacttggcaactttacaacggcccaactgagtttatggagtggggtgacctattctattaccttcttggttaccgctctgatttcaccatggtggggcaaaattgctgaccgccgtggtcgcaaattaatgttactccgcgcctcattaggactagcgattgtcctgggtgcgatgggcttagtccaaaatatttatgaattaattggtttgcgactattacaaggcttcttctcgggttatatcagtaattcaaacgccttaattgccacttcagcaccacaagaaaaaagtggtcaagctttaggcaccctgaccaccggaagtgtttccggaaccttattaggcccgttgttgggtgggattatcgcccaagcaaccggctatcgaacaaccttcttcattaccggtaccatcttgttcatcgtctttatcctctgtctggttttcgttcacgaagacttcacgccagtagaaaaaggcgatcaagtacccggtcggcaactgattcatgaattgaaatacccgcatttaattatcggcatgttcgtcaccacaatgattattcaagcctccaacaactcaattagcccgctgttgagtttatatgtccgtcaattaatgcatcatggcaataacgtagcgttagtcagcggagttgtcgcggctactccagggatcgcaaccttaattgccgcgccgcgttttggtgcacttggcgatcggatcggttccgagaaaattttactcggtggcttgatcttcgccgtcttcgtttacgttccgcaagctttcgttcaaaatgtttggcaactcggtgccctgcgtctgctggttggggtcgccgatgccgcattgttaccgcaagttcaaacgattcttgcgaagtactcaccccatagttccgccggacggattttcagttataaccaatccttccaagcaatggggaatgtcgccggacctttaattggttccagcgtttctggcctattcggttacagcggggttttcctatcgacaaccgttttagtaatcgtcaacctcttctgggtgcgtcagaatacaaaagtcttacgcgaagaacatgaaatacaaaaataatacaaaaaagtggtgtcgctcattttcagagcgacaccacttttttgttgaaacgtgctttttgtggcatatttctgcgcttaacagaatttgccaaatcggtgattacaatcgccaattcgtcaaatccagttaatgctcaaaatataagcgccacaaacgcactctattttttggtaaacatcagtttatctaaccagtcccggttatgtttaatacagaaatagccgataatggcgattaaacatgatcccaagacatccgctagtaagtcccccatcgtgtctaacaaggctgcttggcctaataaaaggtgaccttttgccatataacgttgcatgtttaagcctaacaaactatcgccggtaaattcatagaattcccacaacacaccaatcgtactcccaaacgttgccgcaaacaaactcatgagtaaggctgaaatggtttgacggagttgttttgaaatcaatacgttaaagaccgtataccctaagcccgccaataacccggcactcaagacatgcaagaatttatcccagtagtataagcgactataaaaatgtaatcccgtccccaataaaatcgaacagtatacaaagattaaataaactgcatatagaatctctggaaaccggtatggcataaagcgttcaatgataataggtaaggtcgcaatcaccaggcctgcaaccacttgtaaaacggcaaaagacaatgttccgttgtctttggggttagtcagcatttgttctaagtaataaccaatatagattaattgactcacaatggtgaagacataaagccaatctacccaccgccaatttgttttttgttttgccatgttattcatcctttccattcaaatgatacagcgtgacactccgactaagtcgcaagtatgcgatgaaatgaaagatattgcccagcaaaatcaacagtgcccctagccagctattaatctgaattccgacaatggcaatggcgtaaatcaagacacttcgtaagggatcatttttaatcgtttgataaaattcctcgtgtcgctgttcatactgacgcattagttcatgatgcagtgccatataccgatataatacccaaaacaaagctgagatgactaatgcaacaatcgcatacgatgtaaaagcaaatcgaatatcagcgccattttgttgagcaatcgattccgacaacaaactagttgggtaattaatcagtgtcactgcaaataaaatactgagattgatcacgtttaactgccagttagtttgttttattttcgcaaaataatcgtgatgaaacaaccataatgtccccacataaaaaaaggatagtacataggcagccaaagttggccactgtgcaatcaccgcttgactcaaatgccctgcttgatagtccggcactttaaagtctaacactaatagtgttaataaaatggcaaaaacgccatcgctaaatgcttgtaatcgatcgattttcattattctttccctcacaattcgactatggtcaaactagcgtgggtagtgcataatagttcataaataattcccttaactaggaggctctatgtcatcacctaccactaaaaccacgcagtttaaaattatttttgttttatatagcttacttttaggattgttgattggtggcatagcggccgcctttttagccctcattaatttcagtacacacttaatttggcaagtcggttattcgcatttcaaccagccattttatccgttgcttgttggtctatttggcggattactcgtcggcttaatgcaacgttattgggggccttatcctaaaacaatgcatgaaacactcagcgaatttaaacaaaccgggtccgttgcctaccaacagcaagtcggtaaaaacattatcgccgccttagttgtattagcctgcggcgctagccttggccctgaagccgcgctctcgaccaacgtcggcggcctaatcacttggttgggcgatcgacttaaactaaagaaacgtttttgacgatggggattggtgccatgctagcggccatcttccacgcaccgctagccggtgttggtgaggcgattgagacaacctccttgcgcgatcatttcaaatcacacttcaatcaagttctattatacattctcacaaccgcaactgggattcttggtttcgccttggtcaaccaactcttccccaaagaaagtccatttacactgcacacaccaatcattcattggacattaatagtttggccacttcttattttagcattaattgtcggttgagtttttggcaatctattcttaaaaatagaacaatggtgccagtggctctttgatacgattcagcggccggtcttacttgcaatgatagctgctggtgtgttcttgggtgcttgtggtctattgtcgccttatttactcttttctggagaacactacttgttcacctttaccaaatccggtttagatcaatcattcatttatttactcttaatcggacttggaaaaaccgttctaactaatctgctatttgcctttggttggcggggcggtaaaattttcccagccatctttgcaagtgcggcaatcggtttaagtctcgccgttgtattgccatacactcccggcctcctggttgccacggttgtcgctgtcagttgtacggtgatcgtggcgcaaccgtacgtcactgctactttgttactctttcttttcccgattcaatttttcccagtcattttgctagcgtgtctcgctagtcatcgaattcaaaaaatgttgattaaatagctgattgccgtttgcaattggctatttttatggaaaaaaaggcaaaaaaaaaccagggaaaaattccccggtttcaaaataattatttggcagcgttcttgtctgcaaaaccatattttttgttgaaacgatcgacacgaccatctgcttgagtaaacttttgtttacctgtgtagaatggatgtgaatctgatgaaatttcaacacggattaatggatatgtgttaccgtcttcccattcaacagtttcagctgagttagcagttgaacctgagatgaacttgaagccagttgatgaatccataaatactaccttgtgataatctggatgaataccttgtttcatgtcttttccgctcctttttgctaaagttatctgcatcaattcagatgcacaacttaagtcttgccctgagatatttgctatgtcagagatatttgtttacataaccattaaatattagcatgaatgctaacaaaaaacaatagatggttaacttattcttcaaccattttgacgattgcgcccagacccgttagtttatcaacaacgcggtcatagccccgcaaaatattacttgcgttatcaatcgttgtcacaccattggccattaagccagcgatcattaaacaagcaccgccccgaatttcatcggcggatacttcggcaccttgtaacttgtcggcatgatgtaaaataatcacatcattttcgattgagatatctgcacccatccgaattaattctgggacgtggcgtgttcgtttaggataaagggtatcaaccacaatgccttcaccttgcgcttttaataagagcggcgttagtggttgttgcaaatccgttgcaaatccaggatatggcatagttttaatttgaaccatttttaaattaggtgatggataaacgaagatactatcttccttaacatccatcttaacgcccatttcctctaacttagcgaggtaagcgtccatgtgttcactgatgatgttcttgacgttcacgccatccccgatggctgcagccatacttaaataagttcccgcttcaatccgatcgggaataatggtgtgtgtattgcgcccatacagatgttcaaccccatcaatgcggataatgtcagtcccagcaccgcggatcttagcacccatgttgttcaagaatgtcgcgatatccacaatttcgggttcgcgtgctgcattttcaatgacagtttgtccttcagcacggacagcggctaataataaattaatcgttgcgccaactgatgccatatcaagataaattttagcaccgtgtaagccgtttggtgccttaatttggatagcaccgtggttattagtcactgtcgcaccaagtgcttcaaaccctttaatatgttgatcaattggtcgtggaccaatatcgtcgccacctggcaacccaacgattgcttccccaaaacgacctaataaagcccccatgaaataatatgaggcgcgtaaactttgaatcttcccgcttggaagtggtgtcgaaataatgtgggttggatcaatttcaaccgtgtcatcaacaaaagtagatgagacagacatatcttctagaatggatagtaggctgttgacgtctttaatgtgcggcacacagtctaaaacgactttcgactccgccaaaatagcagcgggaataatcgcaaccgtgctattctttgcaccgccaattgtgacctctccagataagagattgccaccttgaattaacatttttttcatttttagatttccccgttcgctctgcaacaaaagaaccgccttcagtttcccacttttcctgtggtttaaaccagaaggcgcttttgatatttttaagtttttagttttattttttaaaattggaaaacggcttcaatctactcaatgccgttgataattagtcatacatgtataataataattaatcagcacataaattacaaggcatttagggataacatttactttttaattttcatacttagtaaaagctaatcatcgcattcaattgggctatcgaagtctaaaaatgtaaggcttttcaaaacggctcatctccattttcacaactatttttcggtatacaaaaagacgctactttgtcgtgctgactagtagcgtcttttatgaaacgtgcttcctcgaactgccttttccggttaacctaaaaataaggattatggctaaagaacgccataatccttattttcttgttaatcctcaaagccaacccgttcgagtcagcactctacattgttgcgccaataaatgccttgaacaagccttctggtttgtttgggcgtgataggaattctgggtgatattgagctgccacgaagaatttgttttctggaatttcaatgacttcgactaagcggttgtcaggtgaagtcccggcaaagactagccctttgtctgtcaacaattcacggtattcgttattgaattcataacggtgacggtgacgttgttggataacactttggttatcataagcagcagcagtctttgtacctggttttaatttacatggatacaagccaagacgttgtgtcccacccatgttttcaagatctttttgatctgacatgatgtcgattaatttatgttttgcttctgggtgcacttcaccagttgtggcatctgtaatcccagcaacgttgcgggcaaattcaatacttgccatttgcatccctaaacaaataccaagatatggtacatcattttcacgcgcatattgaattgaaaggatcatcccttctaaaccacgatcaccgaaaccaccagggacgataatcccatcaaagccagctaatgtttcagcaacattttctttcgtaatatcttctgattggattggtgtcactttaacatcggtgttataagcataaccggcatgacgtaatgcttcgttcactgaaatgtaagcatcttgcaattcgatatatttaccaaccaaggcaatcttcttcgtgccttcgaggttcttgattgtgtgtaacatatcaatccattctgtcatgtcagcttctggtgctgtcatcttgaagtggttcaagacaaaatcatctaagccttggttcttcaataacaatggaatatcgtagattgattcagcatcgcgtgattcaacaacggcttctggttcaacgtcacagaattgggcaatcttgttccgcatgtcatcaggaattggtttttcagtccgacaaaccaagacgtttggttgaatcccgatgctccgtaattctttaacactgtgttgtgttggtttggtcttcatttcaccggcagccttcaagtaagggaccaatgtcgtatgaatgtagatgcagttttctgcgccaacatccgccttcatttgacgaagtgcttctaagaatggtaaggattcgatatcaccaacggtcccaccgatttcagtaatcacgatatctgaatcagtcgttgtagcagcccgcatgattttttctttaatcatgtttgtgatgtgtggaatgacttgaacagttgcgccaaggtattcacctttacgttctttacgtaaaacttctgaataaattttacctgtcgtcacgttagaatatttatttaaattattatcgataaaacgttcgtaatggccaagatctaaatcagtttcagtaccatcatctgttacgaaaacttcaccatgttggtaaggactcattgtaccgggatccacgttgatgtatggatcaaatttttgaatcgttacctttaatccacgattctttaacaaacgaccaagtgaagccgcaacaattcctttaccaagtgaagaaacaacgccacctgttacaaaaacatatttggtcatataaatattctccttttcttcttagcattacgctaaacattcatgcttttgggaaacaaccaaaaacaaaaacaagctccctattcaaaatgaacagggagcctgttaaccgattctggcttcgcaattaaagtaactgcaaagcgcccaaagaatataatacaagaaatggcaattagcgtcaagcaaaaaaattagtcatttctgcgccgattttaaatcgcctatgctacactatttgcatgacctactttgaaaggatggcccaccatgctacaagacgcgttactagctctagatatcggcggttctgccgtcaaatatgggatttggacgaaacaccaactaattaaccaagcgcaattccctacaccgctaacacgcaatcgcttctattccgaagttgaacaattacgtgatcaatttgcgaccgactttcatttaactggaattgcggtgagttgtcctggtgatccagatgaacagactggcatcatccatggcatgagttatgtgccatttttgcacctcggtgaatttcaaactgaatttgcaacgcgccttggtctgcccgtctctctccaaaatgatgccgacagtgcagcactcgccgagatgacagctgggattggtcaaggtcatctgagcgccttattcacaataattggttctgggattggcttatccattatcgaaaatgggaccattctcaaaaccactgctgataaaatcgataacttcgaaaaattcatcgcagatgccattaaaacactcaacaattcaaaagtctcacccgtccaaattggcaagactgtctccctccgtaattttaaactccccaatacaatcgatggcaaaaccgtcttcgaacttgccgatcaaggggatccgattgccacccaagaagtcacacagatgtatgctgcccttgcggaaatcatgctctttttaaacgttgcttacacgcccgagattattggtgtcggtggtggcattagtcagcgaactgacctactaccaaaattaaacgctgcgattgacgcacttttagccgatgacaatagtagtattaatcgttactggcaacgccgtgcaggggcaaccacccctattcctgtgccacacatcgaaatttgtcacttcaaccaagacgccaacttaatcggcgcggtttaccattttcttgaacgagagtgtgtcgtaagtcgggtatccgacgaggattagcttaaaaatattaaacgcaaaaaaaagacgccaaagttaactttggcgtctttttttatggcaacgaatcggaaacgtctaattaaagctcgtcatcttcgtcttcttcgtcttcatcatcatcgctaaattcagataattgaccttcgataccgtcttctaaggcatcgtcgtcttcatcatcgtcatcgtcaccgatgttttgtaagtcagctttgtattcagttaagtcatcaccagcaacgtcatctgtagctgctaaatcaacatcatcatcagcatctaagtcttcgtcttctggatcatcgtcactgtaatcaatcacatcgtcatcgtcggtaacatctgctaagaatgcattaaccttcttacgacgtttcttcttagttggttggtcttcttcatcttctggatggttaacttcttcatcgacagattcatatgggtaccaagaacggaggccccaaacgttttcgcctaaagaaatgaaactaccatcttcatttaaatccgtataaaattgtgataagcgtgcacgcacttcttcatcacttttgcctaaatagttttgaatttcattcgttaagtcagcgaatgcaatcgtgtcgcctttttcttctaaaattgcatgtgcgacttcaatcattgatagttcttctttattttggcctttaaaaacgtctaatttcaaccagtacacgtcctttcaacagtctatccttaatcatactagcttaagctgtaaaaatcaatcgtaatttgtaatcccccacggcttgattattgatggcaagttggtaatgaaccgtaatttcacctgataacggttgttccttcaccatcgataataaatgggttgtcgttgtgagcactggcatgttgccatattttgtttggtaaattgatccgaggtcttcaccttgcttaaagtacaaccgcaattgcgtctcgtcttcttctgtgccccgcgttaattgaatttgaccgtcagcagccaatttaaaccgtaccgcggtggcttgttcaccaccgtgttccagataacgtaagtaaagtgactctcccattttgacaacttgaccatcctcatcgaaaacgtgtttttcaagttgcccatcttgttgaatttgcgtttcaaggtgtaccttgaccggaattccgctttgacttgccataaataacttcctttaattttaattaagtagttctattataagccattcaaaatttgagcgccagaataatccgccaattctctttgaccagcgtaccgattgcagacagcgcctagaatttacgctataattaagaagagtttttaattttcggaggtgattaccatggatgatttagcgactttatctgccaatcaagaatgggctattttaacccaacattttgaaaaagcggctggaccactcgcttttgctcatgctaatagcctcttagctttgagccgcgaattacaacaacctattattcatttttggacgcttgctgacaatgttattttgggcatgatggatacaaagttacctgcttatccacaagcggttgccacattagaggctgcacactatgcccatttcgtgcgtaacgctggtggcttggggattgtgacggatgccggcgttttgaacgtcagcttctatcttcctgatatggcggatcacctaagcattaatgctgcttacgcgctcatgcaccaattgttcacaactgcctttgcagactatcccgtcacgattgaccatttcgaagtcactcactcctattgccctggcgaatacgatctcagcatcaatggtcaaaaatttgccggtattgcccaacgccgtgccaaaaacggaattgccgtactcttatatgccagcattacaggcaatcaacaggcgcgtggcaaactcatgcacagtttttacactgctggccaagcacaaagccaaacgcggtggactttcccagcggtcatcccggacaccatggccaacctatctgatctgttaaacgaaccaatgactgttgcaacagccattacgcacctacagaccgcttttagccggttggttcaacaaccacaactagttgacctcacaccacaattacaaacgaaagcttatcaacaactactacttaaaaaacaaacagcactccaccgttatcaagtttaacgggcctcaaaaaggagattatattgtgactaacaccgctattaaactatcgcgtgaaaaagtattccgtgatcctgtgcataactacattcgcgtcgagtatcaagtgattctcgatttaattgacacccccgaatttcaacgtcttcggcggattaaacagcttggcacgacttcctctgttttccaaggcgctgaacattcccgcttcacccactcattaggtgtttatgaaatcacacgccaaatctgtgatcaatttcaacttaactaccctagtcaagttgccggtgatggactttggaacgatgatgaacggttagtcgccttatgtgcagctttattgcacgacatcggccatggcgcttattcacataccttcgaacacatcttcgatactgatcatgaattgattacgcgccaaattatcaccaacccggagacagccattaatcgcgtcttaacccaagtcgcggatgatttccctgcgaaagtcgctagtgtaatcgatcattcttatccaaatccacaagttgtccagatgatttccagccagattgatgctgatcgcatggattacttattacgggatgcttacaatactgggactaaatacggagaattcgatttgacgcgtgttttacgagtcatgcggccttacgataagggcattgcctttttagcaaacgggatgcacgccgttgaagattacatcgtcagtcggttccagatgtatcaacaagtttattttcatcctgtttcacgcggcatggaagttatcttgcaaaagctcttgcaacgtgcgaaatttctttatcaacagcctgaccatcatcagagtctcgcaccgcaattattgattccatttttcgaacagaacttcaccttacaagactatttaaaattagatgatggcgttttgaatacctattttctatactggttagactatccggattcagtgctcaatgatttggccgaccgctttttaagccgccgcccactcaaatcggttgcctttagccaacagacccaacgtgttttaccagaattacgggcgctaaccgagcaagctggttataacagtgagtattacactgctgttaataacagtttcgatttgccgtatgacgcctatgatccctccgctaaatcacccaaaactcagattgaaattatacaatctgatggtcaacttgaagagttatcatcattaagtgacttggtggccgccatctcaggccgttttagcggcgatgaacgcttctatttccctaaagaaatgctcaacgaaaatgatatcgaagtcttcgcaccaatataccgccagttcaaagcatacttgcgtaacggtgcaatcaatcctaaccactaaaaaggagtttttataatgtcaatcaaacttgtcgctgtcgatatggacggcaccctattaaatgaaaataacatccttagccctaaaacaatcaaagttgtcaaagctgctaaaaaacatagcgttaaagttgtgctatgtactgggcgaccactcaccggggtcacgccttttctaaaagaactgggtttaactgaagccactgactatgtgattacgttcaacggtgctttggttcaaaatacagcaactggtgaaattctagtgcgtcacactcttgcgcgtgaccaatatcttgagcttgaaaccctctcccgccaaattggttctcatttacacgctgaagacgatcaattcatctacaccgccaatcgcgatatcagtccttatacagtcggtgaaagtgccctcgtcaacatgcctgttcgtttccgccatgtcgatgaaatcgcacctaacaaggccttttcaaaagtgatgttaatcgacgaacccgccgtcttagctgaagccaaaaccaagattcctgctgattttttcgatcgttatcaatttgttcaaagtgaagcctacttcctcgaagtactcaacaagaacgccggtaaaggaaatggtttgcgtgatttagcaaatgccttaaatattgatcaatctgaagtaatggccattggtgatcaaggtaacgatctatcaatgctagaatacgccggcttcccagttgccatggataatgccattcctgaattgaaaaaaattgctaaggttgttactaagagtaaccatgaaggccaagatggcgtggcatacgccattgaaacatacgcctttgaaagccaagcctaatcataaggggagttattatgactacgttaattgatctcgtttacgcgtcaccccttttctttttgattttattcattggtttacagcgatttgaaaaacgccaattaatcaacggcattgtatttaactttttcctcttcagcgcattaatggatgctgcgctcattgtgattcgcctcaataacgaaacgctgaataacattgcaattgctgctgcaattgttgtcgttctaatcgtcatgttcttctacttattcggtattgtcttgttgctgtggaacgcgtatattgtctggaaaaaagaaagtcacacgttatccaacatgctgaccctcctcattgcgttagccatcattggctcatttttcatcccaatcatcacgcgcttgttacacattcccgccgatgttaaattatttgtcagcacgattgtatcggtttttcttttgtatattccattgttcttctatttatatctaacctcactgattatctatcaattcaaccgcccccgttatcaacaagattacatcatcgtcttgggtagcggtttaatcgatggtcaattcgtcccaccgttactggccagtcggattaatcgcgccattcgattttatgataaacaagtcaaaaaaggccgccctgcaccaaaactggtcttttctggcggccaaggtccggatgagaagctgcctgaatcagttgccatgcaacgttacgccattgagcaagggattccgattaaagacaccctcaccgaggaaaaatcagtcaacactttacaaaacatgcaattttcaaaagacattatcatggctgataccactaaaacgaatcctaaaattatttttgcaaccaataattaccacacattccgcgctgggctttttgcaaagcaagcccgtttgaaagcagatggcattggcgctaaaacatcgcgttacttcttaccaaatgcaatcatccgtgaattcattgcaattctcaaaatgaaacagcatcaattcattttagtcgcaattgcaagtgtcgcatttgcagccttaactgttttactcaatcatatgtaacgtaaaaagccgttgtgattattattagtaaaaatatgactcctaacaagcaaccgcagccgatgttgaaaaagaagctcaaaacgctccacacaaaaaggacgcataatataaacaggaatgtcagcatcattgccacctctttatttgcaaaccacgctcacttttaccggcttagatcaactttttcattgatcagccacacaacaatgtcgccaattaaaaccacaacaaattcaccaatgccgactgtcaaatatgtcatccaaaacaaaacttcactgaccagatgtaattctagtgcgactgcctatgacattccggccccattgatgactataaattagcaatcaaacacccctcatgtaacgtttgttgaaaaccaccatagtattgagcagttctgacaaacgaaattgaatcggtctataactcaatggtgtaaaagcaaacgttaaaactacataaagtgcagcaatcaaaactgttttagtgatctcagcaactttattattaagacgtgccctttttaagaatctcctagtttttaggtgggatggtcacgaaccaccatgtaacaagtaattattccattaatactgtactttcaagtatagaaaaaagacgaccgtttatcaacctgaaaagcatgttataattttactattagacattttaacaaccgagtaactagtcgctaaaaatcgtggatcaactaactgtctagcctaacaaatatttgacacgacccacgaaatttatacaatgaatggatattactaatgaaaatcgctattttaactgacagcgctgcgatgatcagcagtaaagtcggatcacaaccgaatattagggtcttacagatcccactttcattggatggagaagcttattatcccaatgaattaccagaagttgctggaatagaaacgctaagggaagccacgcttaacactgtaacagaagagcagatccctctaaccacaatttctgcagtaaccgatgaacttcaacaagctggttatactgacgtactttgtatacatattgccagttcgatcagtggcttaggctcaaatctctctactttcgccaaaagctgtcaacagccgcttaagatccatctctttgattctcatactcttggtcctgcagaaggagcgttggttgaacgagcacttactatgattactcacggactaaaaattgctgacattttagcagaactaaccaagtatcgccaaaagcaacatacactggtcataatggaaaatctcaaaaacttgcgtcggatcggttctatttcaaataatgcacatctcttcagtaataatatgctgcattataaaaccttgctacatttttccgaaaatggtgaacttgaagtcttgatgaaaagttcacgcacgaaaaaaattgcaacggcgctattgaataagtttcgcagctctgcagcaaaaccggaactagcaatcgtggcagacaatacaatggtcttggaaaaatatgtttcttgcctgaaagaaattatgccgcaacttcaactagtaactgatctatattcaccttcgatattttccttcatcggtccacaagcactgatcattagttggcaaaataattaactacatgcaaaaagatcgtccttcaatttaaagaagaacgatcttttttgtttgcagttctcttatattaactttttgctatttaataacggactcgcaattggccagcttctcagctttctgcttagttatctaaatcaaattgacccgtcagtttttgcaactgagcagcagtttcttccaaggtcgaaacatgttgggtaaactcatccatcgtagcttgcacttcttcagagttagccgaaacttcctctattcctgctgcgttttcttgtgttgaagctgagatgctttcaagtttatctaagatcatcttttgagtttcactgatctcttttgtaccctcatggatcttttgaacatttgcacccatagcttcattatgcttataaacgttcattgtcgacttgatggcttctgtgatcaaaccagtctgtttttcactgctttccagtgagtctgttgttgtcttgaccaaaccagttgattgctgtctgatctgttcaatgatcgactcaatttctttagtcgaatcattactttgttcagctaacttccggatctccgctgcaacaactgagaatccttttcctgcttcgcctgcactagccgcttcgatcgatgcattcaaagcaagcaagttcgtctgtcttgcaatatcattgataacgttaatgatcttagtaatgttttgtacatcactatccatttcctgaacactactcatcaaagcttgcattccgttgatctcatttgaccagttaccattgaccttgtccatgacatccaggttattttgtccaacttttgaagcttctttggatgaattagcaagctcttccatattcgcattgacattatcaatatgtgcagtgattttttgaacgttatccacgctttcagtagtttcttttgcttgtgatcctgtcacttcagcaatttcagtgatcgtctgtgcgatttcttcagaagcagttgctgtttgtttcgaaaggtcaagtaatgatgcagctttttcagaaacattcttggcttcttgctgtgtttgtccgatcagaacagtgacagaagcgatcatattattgtaactagccgctaatctgttaaactcatgtccattcacatcagctctggtcatcttttgagctagacgttctattggtaccttagaatactcgattttttcacccactgcaggcacgtaactcatcttaccttggccagcatctataaagaacttctcaagtattaataaagcacgtttgagcaaacctgcactatagtaagatattatcacggctaaaatgatgatcgccaacattgagattgtcaaggttatcaacatatgatgtgtgcctgcgctcaaatcactattgttcatttgggcgatggtccaattgtcagttgtgccattgcccttgtcaaaggtaaccttattgatctgcgaacctccaggaactttgatcgtccccttctttttcgctgaagcagccactgctttataaacggctgtcttgttgatcattttacctgctttaaaagtattattgcttttaccagtgttctttttgatcaaaaccctgccggctttagttaaaacggcggcttgaccattgtttccgatttccatcgattcaacagatttttgtactgatgaatatgaaacagtaactgctaaaacatgggctttcccctgcttatctacgattttctgggaaacacttgcactatacgaatgattagccggatctttataaggaatcgaccaatatgcatgtcctgtgggtgctttttgataccaatcttgatctaaaatattcatatctttaggcatcgcaaaattcgaataagcatatgtaccatcagtgttgacatacatcaagttggtgatcgttccctgggcgtcgccattggcaattttcaaagttctgttagcatcttttaagttgacattattggtcaactctggtcttttttccaaactagcaatttgtccagtaacatcttgccgcatgtcaacttgttgccgttgcaaaacatttacagccgtcacttttaaacggtcatttttctcgatcaattgctgacgtgtattcccgtatgagatcaaattcattataattgccggtaccaatgctatcaataagagtgacgataaaaaatacttctgaatactctttttagcaacttttttcttacttgccattttctttccccatctttccctaactatctaatttgatcccctaaggatctcatgactatcgttcacaaaagcactgaagcaaacaacccctaaataatatgtttgccagtatttgcttttgcttgcgctgaagtcatcaaattaacgagcaattactgctcttttacccctttagccccactaaaacaaaacataactttaacgcagataatctaatatcgaagtttgcatgaccttagtccccatagccaaggtcgaacgatatgcaatcatttgattttgatattccatatacttctctgcaacatcaacatcttgtttattagacaaagtttctgctaaagtatttttctcggatttgttccgagctgatgctgaacttaaacgattttcgatcgaaccgaccttagacctatagtcagtaaagttttcagtaaatttatcgatccctgacaaatattcactggataactttctatcaggatcccccgatttcaaagtatcaatcaaaccgctaaagaattcggtcagttcagacttgctatctttatcaatgccagacgaaccatcggcatgcatcaaacgtgaaccatcagtagctaaatctaagctgacaccatctgagatctcgcgctgtaaattatccacgttgcctctgtattctaaactgacagctgccccttcagcatctttaataacagcaaatggtggctcttgtgtctttgtccccccaaagatatacctgccatcatagttggtattcaaggcatcaactatccctgagatcgactgtgagatttctttacggttcgcattgtaaacggcaggtgtagctgttccgctattggccgacgactcgatcaaatttctaatgttaagcatcaaggtcgaaacattatctaaagctgagtcttgcgtttgcgaccagagcgtggaatcagaaattgtttggccatacgttttgttttgtgaaattgaaacattcagatctaagatctttgcgactaacaaaggattatcagaagccttattgacctctttcaaactagacagttgattcattgtcttttgaaccttgttagtactgatctgtaaattcttcaagaaatcagaatattccattttactggaaaccctcattgattaaacccccgttctattgatcaaagtatccaacatttctgaaacgacatttaacaatttggcattagcttgaaaaccttgttgaaatctgatcacatctgacatttcttcgttcaaattaacaccagaagctgcttgatctttgtattccaattgattcaacgctgataattgagcagatgccatattgtctgctttttgtttagatatcccattttttgtcacgatactgttataggcacctggaatcgttaaaccatcttgagaattattgaaggtcaaagtacccttattataattttccaacaatttcgccgtatcaaccggataatcaagcttactcttaagcgccttagccatcgctaaagcacgtccattatctccttcggccggatcatcaccagtaccgactttcattttgcctggatctgcgactaaatcatcgttgatcttaatacttaaagccggatcactgggatcggtgatttcaaaaaagccgctatctggagtttgcccgtcagaataaacgatattttcaatttctacaacgcctttagcaaaatcatttaattcagctcgatggctttccacttcagccaatgattcttgcaaaccgccgatcgaacctgacttaactgctaacttgctatacttacctgaaccgttcgctgtttcaaaaacgacttctccgaccgtgaagtctccatcgatcgtttgctttggttgtgtttcatcaccatttggcaaaatctgagctttgccgtcagagttactgacaacaacatttaacttagtctgtactcctttttcattgtcaaccactgcatggtcaccgatactaagtgaagcacggccatatttgtcaaacgaaactgttaaattactttcagcagacatatcctttaataaactatcgcgctgatctaacaaatcattgggctgttcatcacttaaatgactgtcatacaactgttgattcaaattagcgagttgttccgccttttcattaaaatctagaacagttttcgccaaagaagaacgtgtatcagtagaaacttgtgaaacttgccgtgcagtttgctggatataagaagctaaagcaacacccatttgaacactattagttttagccgtatccaactcgggattgtcggctaacttttgtaagctgtcagcaaaattattcaattgtgtaatgagtccatcgtctgacggctcatgtaatgcattttctaataaagccaaaacatctgacttttggacgttaaaattgtaatctgaattagaatctcgaacctgtgaacgtacaaagtcatcaacgatccgtgagataccatcagcttgaacaccgctaccgatcaaaccgactcctgtttttgcataagggatcttcgttgataaatcaacacgttggcgcgagtaaccttcggtattagtattagcaatattatgactgctagtctgcaagccgatttggttagcatctaacccactgcgagcagtattcaaagtaccaaataaacctgacatgaaagtcctcctaaagaataacaaggtgaagtgaaccgcataaaagttgagcactatcggactttgacaataagtcgtggtttgcgacttgttggcgaagttggataggcacagacttttggttcacgcaacctgactaagaataacaaggtgaagaaatgcggttagaagccgagcattaacggactttaacaataagtcgtgcatttagcgactttttgttgaagttagttaagcacaagcttttgcatttcgtaacctgactaataacaaggtgaagtgaaccgcataaaagttgagcactatcggactttgacaataagtcgtggtttacgacttgttggcgaagttggataggcacagacttttggttcacgcaccccttctacaacctaaaatgactgatctacgattgccgcaggaatatcttctcgcttaggttgactttgagtcctatgctgatcaacataagtattttcctgtttttccaagctgtgttggatcgtatccatcatttttttctgataagccaaggcttgttgcgtcaacaataaattagtttcttgcaactcttggatttcttgaatcagcatctttgttttgtcgccaatttcaccagtatacttctcaaaaatcggtaagaaatcttccttttgcggaacaatttcatttagcgattctccgtcatcaagaactaaaaacttttgttcacgtttcagtattttgataaataatttaagcttagcctgaaatgccttttcattcatctttatttccttcttgtttcatttcctggaacatctgatcagcaatcttttctggtgagaccttatatgttccgtttgccaactgctgtttgattttgtcgaccttagccgcatccacatcatcgtctatatcacgatttttagcgttgtttactaatctttgagcagtatctgataatttaacattaaactgttgtggtgcaccctttttcgttgttttcgaggcttgattgtgatagtagttttggatcatttgtgaattgattgaagaaatatctcgattaattttcatgtgaatgcctcctttttcctttttgactctacaaatacagttatcggccaaaataaaaaaagttaaacctaaaagttcaactttttttaacttaatttattttattgatcctttgtttttgagaaatgatcttattgatccgcacgccaaagttttcattgatcacaacaacttccccagttgcgatcaattttccgttcaacatgatctccaaaggttcgtctgttaatttatcaagttcgataactgaaccagtgttaaagttcaaaatatctcgaacagtctttttagtccgccccaagacaacgcttaggtttaatggaatatctaagatcaaatctaagttatcaccgctgatttcttggtgactcgacaattcttcaaattcgggtttagaaatttccacgttactgacctgcgcctttctttgtggttgttcattgcttggtttttgcgggatcttaacttgttgcggagctggttgtggtttactaatagccttggctttctcgactgctggtttctccgcatcacgtttgacaactgttgctttgtcagacatcattgctttcacaatatctttgaccatttccaaagaaaagatctgcataatttcactctcgatcagtccttctacatccaagttaaatgaaatacaataaatttcttcctcacggtccaaagagtcttcattcacatcgccgggattttcccacaaatgcacttttggaggaagaatatcgactttttggttgatcatagtagccatggatgtcgaagctgaaccaatcatttgattcatcgcttcacccacggcacttaattcgacttcagtaaattcttctgaagctgactttccatcgccacccatcatcagatcagcaataaccgttgcatcactgacctctagcaacattaagttagttcctgctaaaccttcacgaaattcaacggtcgtagcaactttgggtgcatggatctggtcgagtaattcaccaaaatggatttttttaacacgtggtgtcgtaattgccacacgatgagtcagaattgatgacagagttgttgctgcctgtgacatggaaatattaccaacttcaccgatcaggtctttgaccccttggcgatctaacccctccaataattcttcatcatctgattgcgcagcttcttgagtatcactgccattcatcaaagcatctatttgttcttgtgttaaactctccgtcattcttcttccccctcgatcttgctcaataactcaattgcgaattgtccattctttttccctggtttgacccagtaaaacggtcggtcttcaatgtacgtatctaacggactggagattttagagtccagcttgatgacatcgcctggttctaatttcaagaaatcagccaagtccatttgggtgttgcccaaaacgacttccattggcagatctattgcgtttaacccgtgttttaattcgctttggtcatcttcacttaattcctggcttgagtcaaaccaattatgcaaactcaatttatctaggataccttcgaatgaaacataaggaatacacaagttaataaatgttgaaactccgaaaagctgtactgtgaaagtagctaatacaactggttcattaggtgataaggactgtagtaattgtggatttgtttctagagattcaagctcaacatcaagtgtcaggacttctttccaaactgattgcaaaattttagagaattcacccataacctcatccaataaagttaattcgatatctgtaaaaccatttttatccaaaggcggttgattttttcggttactctccaaatcagcaccaccacacaacaattcgactaaagtcatacatagttggggattgatttcgatcatgtgtgatcctttaaggggagctgctttaaacattccgatcaaagtcacacgtgggattgaatgaatgaattcgtcataactgatctgctcgatcgatgctaattgcatatccaagttagtccgcaagatatttgaaagaacattgccgctcatcttagcgaagtcttcaaaaatcatgtgtaaggtatttatatattctttagatagccgtgtcggccttctaaaatcgtatggcttcgcttgtgattcgtcattttgctcttcatcgatcacttcttcgtctaattcgcccgaatcataggcatttaaaagtgaatcgatttcctgctgtgataacacctgatccacaaagacacttcctctcgctcattagttcattccacaattaaaaaatcttatcattaacgtcgatcacatcagcaatcgtttgttcacccaagtctaccacaccggtaaaataaagggcggcttgatcttcacttagttgaatatcatcaggatcaacatccatcacttcgatcacttcatcgatcaataatccacgacgttcatcgtcttttttcattatcataatatttcggtttgtttgtgattccgccaatcctactaactgtgccaagctgatcaccgtcaacactgtgcctcgcaaatttatcaaacccttgacccaaagcggagcaagcgggactttggtaatttgaaccgtatcaacaacttcttctacagtttcggcagctatcaaataatgttgctgattcattttaaacaaaatcatctgcattaaaacacactccctttcttaattaaattcagtcaatagaactttaattaagacaatgccttatctaaggctttgatcacccgatcagtatcaaaaggtttgacgataaaatcgactgctccagctctgatagcatccatgaccattccttgttggcccatcgcactgcacattacaacttttgcactgctatcaaattccttgatcattttcacggcctggatcccatccacatccggcatggtaatatccattgttaccaagtccggtttctcagactgataaaggtcgaaggcttcttgcccattttgcgcttctccagcgacctcatagccgttcttttctaaaatatcctttaatttcattctcataaaaacagcgtcatcgacgatcaaaactttatttgccacgcgacattctcctctcaaactccaagtgattttatcattttgtcaattacacccaactctgggatgaagtatagtgaagcttccaagtaattagaatcataagtaaattcatttctgatcaccatgatctcatcaccaaactgttcaaattccatatatgcactactaatcacggcaccaaacatatcaaacgaacttaccggaacttctggttttaatttcttttccagcatcccgccgatcgatgttaaaaatgaacttgaaacaatgttagtcaattcactaactgcagaaaccttaatttcttcggtcacaccttgatctgttcccatcatcaaacttgagatctctttagcggccgggtccgtaataacaaatagcatcgcaccctttaagtcaccatggatgctgcttaaaacggtataaacttcctggtcatcggccataacttgctggtaaagctcgtcataacttaagatattgacttctggaacacgcatcctgatcacactgccaaccatttgtgatattgttgtagctgctttgccgccgccaatattcataacttcttttaacgcatctaattgtatgtttgaatatgccatcttaacccacctgtgcgtctttacagatcgtattgacgtccaagatcaatgcgatcgagccgttgccaaggatcgtcgcgccttggaatcttttgattttttgcaacatcggatcaatcttcttgattacgatttcttgctgtccgatcaattcatcaactacgatcccaaagtctttattatcacccttgatcaagatcatatatttctttccctgatccttttcagggatattcaaaatgttggcagtccggatcactggtgtcaatcctgtctgtaaaggatagacttcctgactagcagtttgtaaaatattatcttcatggatcatttcgacccgttcaacaacatctaacgggatagcaaatgtttcttcgcctagtttgaccatcagtgcctgaataatagacaaggtcaacggtaatttgataactgttttcgtacccacattgactttactgtcaacttccaatgaaccgcccagttcgttgattttagcttgaacagcatccaagccgaccccacgtcctgaaatgttagtgatctttttagccgttgaaaagccaggattaaagactaacatttgcagctctttatcactcataccggtcgtatcgattccacgctcttcagcggtaattttaaggacttgtggatcaaggcctttaccatcatcgctcaaagtgatcatgaccttatttccttcttgataagccgataattttatctttccttcttccggtttgccaagtttctttctgttttcagcatcctcgatcccatggtcggctgaatttctaactaaatggatcaagggctcactgagttcggtaaccacagttttatctaattcagtttcttcgccctcaatttcaagagtcatctttttatttaactggttggaaagatcgcgaaccatccgtggaaaacgactaaagacaacgctgacttgctgcatccgaattttcaaaaccaaatcctgcagttcagatgtcaagcgtgaaacctgttctaaagattcatgcacttcttctaaattttggcgactattggcatcttctagttgattgcgataaacgaccaactcagatacaacattcaaaaaggtatccaaccgagaaagatcaactctgatcgactgatttttggcatttttttgatgcgaagtgctcttcttagacggggcttttgctttcttaggttcaggagcagcgctttttttctcagtagtattttctttgtcaacagctggttgtgcgtctttttgtggttcttcagcggctgccttttgagttttctcatcgaattctgccgtcaaaacttcagcgatctcactactagattcaatgatcttcttaatgtcatcttgattactttcagttaggatcaacaatttgaaatctgtatcaaaattgccttcttccagctggtcaggagccggttcaatgtgaataatatctccttcactgtcgagcttatcgatgactaagaatgctcgtgggcctttcagcattgactctggatcgattcgaactgccgcactgatcacattaagatgttgtgttttagcctgttcgatcactgataagtcagcttcttctaaagtttcaaatttcagttcgagctgactatcttctggagctttcttctcatctacatttttatcagcggtttttgtttggccgccatctaattcattttcaactttatctaattcattccataattctgtgatctgatcttcgctttgttcttcttcatctcgcaagccgtctagaagttcggtcaatttatctaagcaccgaaaaatcagagaaatatgatcacttgttaccttcaacttgcctgatttgaaaagatcaaaaatatcttccattttatgagtcaacttgctcatgacagtatatcccatagttgctgacattccttttagggtatgtgcagctctaaaaatttcattgatcaaatcgatattgtctggttctttttcaagttctagaatattatcatttagttgtgttaaattatcttcgctttcttcgaaaaagatatcgcgataaacactattatcgtcagccatcaatgatccccccattcaaattatttacacctaagcacgaatggtctgtgcttattgttaaagtccgctaatgctcgacttttaaccggctcactccaccttgttttcttagtcaggttgcttgagacagaaagctccgcctatccaacattagttccacatcgcaaaatacgcaatctgaatctagtgtccgatagtgctcactttctcccgtctcactcaccttgtttctcatatataaacgactctattttctttaaccccagcttttctgcgctgttaagtgtttctgttgctcccgtgaacaatattccacctggtaccagcgcctcacttattttttgataaactcgatcgcgtgccatgggtttgaaataaatcgttacattgcgacaaattatcgcatgaaaacctgattcatactggtcagccaataaatcatgtttcttgaacgaaactcgttgtttgacggctggccctatttgatactggtctggtcctaatgacttaaaatatcgtctaacatcagtatcagaaatattttttaactcatttgtcgaatactgacctaaacgtgctttctttaaaatgtcatcatcaatatccgttgctagaacattgcccataagatgatttttttctaagatcatcgctaaggtgtatggttcggcgccggtcgaacaagccgcactccatagtttcaaattattaaattgtggagcaactttttctaacaaacatttttcaaaattactaaatatttcttgattgcggtaaaattcagtcacattaattgtcaaatgctcgataaactccgctcgtttgattggatctttgtccaaaaggtgttcatattcatgcaacgagttgaccccgtttttatccataatatttttgatcctgcgttgcatttgtctttctttataatcatcgagatggatatgatatttctgctccacccacctattaaaatcagtaaaattttcttccaacattttaatttcacccaacgatcgtctgtagtattttcccgatctcatgcaaacttacaacttcatcgacaacttgagcttcaattgcagatcttggcattccaaaaacggtacaagattcctgatcttcagctattacataaccgccttcatccatgattgtttgcaatcctgccgttccatcatgccccattccagtcaggataaaagctgttaaattagcaccataatgagcagccgccgtttcaaacaagtaatcaacggctggccttgtcccatgcatcttcggacgttgatctaacttgagccggtcaccttggatcgtcatgtgataattaccaggacacaagtagatctgatttttgaccagcatattatcactagcctcaacgactgtagcgccgctttcttcatttaaacgctcagaaaacgtgcgggtaaatcccgctggcatatgttgtacgataaaaacaggaatgtttgtatgactcacacctttaataatttctaatagtgcttttggtccacccgttgatgagccgatcacaacggcttggggcctgatgttacgctttttatgtgctccgttgggtttggctttatgattggcagcaactggcggtttactagaacgtccgcaaatatttttgatctttgcatacagttctctgacccactcgtcttgaatttccatcaggttcacaggtttttcgataaaatcggccgcaccatattctagagctttgatggttactgcctgatcactgactgcacttagcattatgaccgggatagaataatcctttttgatctgtctaagggcgctcaagccatccataacaggcatttcaatatccattaaaattaagtcaaaatcattatctgcatcaaggatgtccaaacaatttttaccgtttcgtgcaattcgaaccgttgaaacactgggcattttattcaatatatccgagatcactttgcgcataaatgcagagtcatcaaccatcaaaatcctattcataaggtataagaatcctttcacatctttacttttctctcttaaacaacattctcaagtcatcaatgagcaaattttcgttaattaaaaaacagtacatagtttttaaatgtatctattttcctgtctcacgaccctgatcaaggtcgaaaaatcgtttaaatcgacgaccatggtccttccgctgctgccgcccgtatcttggccaactaacgggatctgcaggcttgccaactgatttaaaacagcgtcaacatttctctgaccaatattagctgtcgtgaggttgtttttaaatccaaacatatttgcaccaccagagatcttagcttgaaatttagctcgtggtgctttttgcttaagttctttgaccatcaggggtaacgccgtattggcatacttagccaagttcaaacctgaagtcccgttcttttcaaacggtttactatcagggagcataatatgactcaatccaccgatttttgaaactggatcataaacgatcgttccaatacaagaacctagccccacggtcattattttattaggcgcgtatgaaattttataatcagagattcctaccctggtttcgttagtgttctgcagcatcatccgtattctcttctttttctgaattttcagtaatggaatctacggatgaaatgatctcctcttcttgtgaagagttgaaaagataatctaagttcaactcgatcactacttcatcgcccatcttcaaaaattgactgatatacgggcgcttcagtgatgatctgtccaaatctttttcataatccgtctcagtcagcgacatgatccctacgatctcctcgacaaagatccccatcgtccgttcgctccaatgtgccaagatcaccttagagtccagcgttgcaggcgataattcgccgtaaagccgcttactaagatcaacgattggcaacatctgttcttgatattcatacacacctaatacatagtctggcacttccggcaacgagataaacttttcagtttcgatcactcgtttacccatttcaactggcaaagcaaaaacttgcttatgacttttaaaaacaacatattgtcccatttttgtacccctctttaacttctacaactaagaattgacgctgctagttttttaatttgaaactgccgatttgcaaacgtctgatctcatcagcttgttgaagctgttcgacacttttttcgagttcttcgatcaaggaataaaaatcatccaagttagccgatacttcctgtgtacttgcagaagtttcagcgatctgtgaatccatttgctgaatagaattattgactgcatcttttttatctttgatctcatctgcatgtgaactaacatcggttaggccatcgctcaactgcgtgacatcctcggtgatttgttcgctagccttcagtacaccagaaatattcatctgctgttgctgactgcccttgtatgatgcatccagatcaacagtcattttcttagacttagcacggatcgattcgatcagttctctaatattagtggttgatttgccggattgttctgccagatcacggacttcctcagcaacgattgcaaagcctttacctgcctcgcctgcacgagccgcctctattgaagcattcaaagccaacaaattagtctgttctgaaatatcattgatcaactgcacgatattgccaatactttgaatatcttgattcatcgccgtcatttcagaaacaatcttcttttgactttctgtttcttggttccaagaccgtgaaacttggcgcatcatttccatgttttgaatattactttgctttgattcgtcagcatagctattcattttttcaattttctggcgtatctcttcaatttggtcaccaaaaacattcatttgagcaactgtactttgagaagctgttgcttgctgtccagcattagtagcaatagtccccatcgcttgacggacaccatcgatcgaacttttagcgtgcgtcgattttccacttagatcgttgaccattgtttccgactgctcagtttcttccttgatcccagttaataaagctgaaaatgcattggctaaaccaagcaactggtcacgagttttaataaacattgggctttggccgggaactttgccgatctcgtcgatctgactgaaatctccctctaccatcttaccgacctgaacagaaagtttttttaatccgccggcttctcctcctgttactgccgtatttttatgaccaaatagtacatacaagagatgcaaagcgactacaatgaccgcgagtatccaaaaccttctcatctccgctgtctgtgccgaacttaaaacaaaagcccgaaaaacaattaaaacaatgactgtccctaaaactggcaagaaagctacttcggagttagcttttttagccgtcttcttacgtttttccatttgttttccttccccatataaaagatttggtatctgtcataatactcacttaagcaaaacgacactccaatctattatatcggttaaaattttatttttttaaccgtttaccaaacatagacatcttttggatcagaaaatcttgaatatccaccgtctggatcatctcggatcagttctccattttttagttccaaagttcgatgacgcaaagaattaaccatggtactgtcatgtgttgctaaaatgatcgttgtccccatctgattcaggcgaaagaaaatttgcatgatctctttggccgacttaacgtctaaattagcagtaggttcgtccgcgataataactggcggatcattcaataacgcacgagcgatcgcaattttcttttgttgcccgactgaaagttcctgaggcaaccgctcaataaatagcatcatttcgacactggtcaatacctctgccatccgctcttcccacttttcagtggggatctctagcgctgacatacaggtttccatattttctttgatcgtcaatcgcggtaaaaaaaggtctttttgcgaaacgatccccaattgacggcgtagtttgtatatctgttcatttctcaaatattcaatttcaatattgccgatccgggctataccagaatcaatggagcgttgagcacttaagatctcaagtaaagttgttttcccagccccacttggaccaactacataaacaaattcaccttgttcgatcacgcatgaaatatttttatttgcccaaacattgccatatttttttgttacatttttaagttcgatcaattttttctcctaaatcagtcggtaaagtggttgatggtctccatcatttcatctgtagatgaagcagcgcgggcattcatttggtaagacctctgtgctgttaataattctgtcatttgagtagccagatctacattggaactttcaagagttccttgcatcacactactacctgccccagcggctctaaaaccgccattggctaaatacaagttatcaccaactgacaccaatgaatgtgcgttgtttggttcaaataaacgtaaagaccctaaaacctgatcaccggatctgatcgttccgtctgaagaaactttcaagtcccctgctggccaattttgttctggcacccgcgcgtcaactgcaacccgatagccgttgctggcgatcaaaccaccgttagcatcacgatgaaagtctcctgccttagtcaagtatgtattaccatcgggaccaatgatcccaaaaaaagcattgccgttaatagccatatcaagtgcacgaccggtcgtttcaaattttccgacttgatcatcgactcgtgctcccgcggcatttagaccagtattcgaatcaactcttgcattagaattaccaagtgcaccgtcgctattagttaaattattattcatcagctcattaaatgaattgatgattcccttatagcctactgtgttttcgttagcaatgttatgtgaaacattatccagattattttgcaagccgttcaaacctgttctgttaatggataaaatagaattcaagttcatttttacttactctcctcatttcctacatgatctgttttctcaagcctatactaagtaccatcaagactcactgtacgcctgagaaaaataaccaactatttgatctagatccgacctagttggttgactgccttatccaaggtcgaattagtagctgatagcactttttgttgagcctgaaattggcgcccggtttccattaatgagaccatctcatcagcagtagaaacattagaattttcaagcattccagcttggaccggcaaatcaatttgctgggctccctgcccggtataaagcgttccgccgacattttgaagttgtgcatttgctgggaaagacaccaccatcaaattttgttgtgcttgctgggcatcaactgggccgccatttcgacctatcacttgaaaaccttcttcagtgatcagctgaccggcatcattcactgaaaaatgaccatcacgcgtatacgcgatttgaccatttcccattctaacggcaaaaaagccattgccttgaactgcaaaatccgttgccaagcctgtcggttcaagcgagcctttttgcatgtccagagcactgccctgaatttgattgccccatgtaaaaccgccaatctcatggcgggtttcatttttgggaccagcctggttattatgtaactgtgcctcgttcattgttgcttcaaacaaatttttttgcaggtagccaggtgtcttgatattagcgatgttaccgctaatattttcttgttgagcttgcaaaacattaaaactatgtcttaaagtatcaattcctctaatcatcattttcctccataaatccttttagttttccaactgcacgcccatggatctgtgaaacgcgtgcaatagaaacgtctaagaccaaactaatttctttaagtgtcatttcctgttcgtaatacaaactcaaaactaattgttctctttcagaaagcttgctgatcgccgctgccaactcctgtttcatttctgtttccaacaaatgtgcttgtgcatcgcccgtttttttatcacgaaagatctcttgtctgctaggcgattgttctgctgaaaacaagacatcctccaaagagatactagccatataatgcaagctatcataaatatcgttcagctttttctgattgatttggagcttactgcataattctttgtcagtagcttctcgtttcaattcttgctctaattcctgcttagcccgataatagcgagtcaaattgtcaaatttataacgagacaaccgaccgtgactgcggatctcatcaatgatggtcccacggatccgtacataagcataactttcaaatggtactttcttttgtggatcaaatttcttaagtgcatcgatcaagccgatcactccagtattgaagagatcttcgtagtcataatcggagcttttaacagtgatccgagcgatgaccttttcaactaaaggcaaatatttgataacttgatcttccatattcatctcatacaagaaaaaagctcctttctgaaaataccgggtgaagtaattgtcttctatccttgttcttgcaaatatgtgttgcaaattggaatgtgacgcttactttggcatagtttgtctcacaaatcagaatgtaacgcgtactctggcatagtttgtgtcacaaatcagaatgcaacgcatactctggcatagtttgtgtcataaatcataatgcaacgcatactctggcatagtttgtgtcacaaatcataatgcaacgcatactttggcgtagtttgtgtcgcaaatcgaaatgtgacgctttctctggcatagtttgtgccacaagtcagaatgtgatgcatactctggctatgtttttctcacaagtcagaatgtgatgcatactctggccagctatcttcaacacgccttcccacagagtgccttcctaaaattgcaactgcccgactgcctcgatcccgatttcatttgggatctcatttaacgacaaaattgccaaatctgggaagttaaacgacaacaactttctaaacgcagttctagtctgtggatttgtcaaaaggacaaaggaaatattttccaccagcattttttgattcagctgagtgatcgcatccaacatcttattgaccgtatccggctgcaaaacaggatacgaaccagttgctgtttttttaatactctgtgcaaccatttcttcaattttgggatgcacagtaacggcataaattttgttatcttcaccgacatacttgttggcaattgttcttcttaatgcttggcgaacgtattctgtcagcgtttcggtatctttggtgacggtcccataatctgccagagtttctaagatagttgataaatcattgatcggtaccttttcttccaacaaattctggaggaccttttcaacttctcctaagcgtaaaatatctgggatcaattcatcgatcacaacgttgctttgttgcttaatgccttccaataattgcttaacttcttggcgtcccaaaagttcaggagcatgtgagtaaataacttccttcaaatgagtggcgataacagtcaaaggttcgataactgtgaatccttgcaggtcagccgcttctttatcactttcattgatccacatcgcttctaaatgaaaggctggttccacggcttggatgccattaaacgggatctcatccccagtcggactaaagatcatgtatttatcaggataaatatcacccgtgccgacctcattgcccttgatcttgatagaataattatttgcatccaggtacaagttatctcggatcctcactggactgaccaagatccctaattcatgagcagtttgtttacgtaaagcaatgatccggctcatcaaactattgtcgatcgaactatcgaccagcggtatcagtgcataaccaatttcgatcgctaaagtttcgacttggaaatcggctacatcttcgtcttcttggacatcttttttcttttgtaaagccaaagtctgttttcgttgttgctcttccttaactttcttagcatcctgttgtttgatcaggaagctaacaccaagtagggctaaccccataaccataaagggaataaacggaaaaccggggacaagggataaaaccattaagatccccgctacgatccggaatatttgcggattgcgcaacgcatcttcagcaatatctttaccaaacgtactatcattatcagagcgagtaacaataatacctgaggcaattgagatcaatagtgaagggatcgaactgaccaagccatcaccgatcgacagcttgccaaactgtgataaagcttccattgcgctgagatcacctttcatagtaaagatgattgttccaccaatcagattgactaaaacaatgacgatccccgcaatggcatcacctttaacgaacttgctggcaccatccatcgaaccataaaaatctgcttcacgttgcaggtcttcccgtcgttttctagcctgcttttcatcgatcaaacccgagttcagatccgaatcgatcgccatctgtttccctggcatagcatccaaggtgaaacgggccgacacttctgaaacacggccggaaccgttagtcacaacgaccaactgcacgatcatgatgatcacgaacaagatgatcccaacaatatagtttttccctgccataacgtcagcaaaggcggcaataacatgtcccccatcaccttgtgttaggatcgcacgagtcgatgacatgtttaaacctaacttgaacatcgttgtgatcaaaagtaaggttggaaaagtagtaaattccaagactgagtgagtaaacatggtgatcaataatatgttcatggcgatcgccatgttgatggtgatcaaaaaatccaagactggcagcggaagcggaatgatgatcaaaccaatgatactgaccaccaaaagtgaaacgatcaggtcagctggtctgagtgcattcttcttagctgctttttgcttgtttttcatcagttactctctctcctatcaactcaaatccggttcaactttaaccagacttatattttatacttagcttcttcatccaaccggtagaccaaagcgatcaaatcagcgactggctcaaaaaactcttccggaatgaattctcctgcctcgatcttgagataaattgctcgtgccagcggtttattctcaatgatcggtacatcattttttctggcttcttctttcattttcatggcgacctcatcagctcctttagcaagcagctgtgggactggtgtttctgtcttatcatacttgattgccaacgctaaatgagtcgggttcgccaaaacgactgtcgcatctttaacttgggcgatcgagttccggaccatcgcctgatacttagctttccgctgcgctttgaccttcggatcgccttccatttgtttcatttcttctttgatctcttgtttagtcatcttcaatttcttagtccgactgaaactttgataggcaaaatctgccaaccccaaaaccaacaaaaccaaggcaatctgcatccctagttctttacaaaaattgagaataaaaaacaagatcttggcaggaccaacagaaccagcatttaaaatgtcacgtaacgtagatatgtatttgcgataacacagatatgcgatcagtaagaactttgccagcgtttttcccaggttgactatcgcatccagactaaacatccttttgaaaccacttaaagggttcaaacgtttgaaatcaggctttaatggtttagccgtaaataaaaaaccaatttgcacaaaattccccaaaaaactgatcaaataaccgacgaccaagaatggtgctgccacgattaaaaccgttaagatcgcctgcaagccaaccttaggtaggtctgcgtataagacctggtagttatccaactgctcgataaagcctgtcatataaggaaaaaacttgcctaatccaaattgccaagcaggaataaagataaacgaaaaggtcaataaagccaaagcagctgttaagtctggacttctagcaacatttcccttcttgcgcgcatctcttttacgcttaggggtcggtttttcagttttaccatctttatccatgaaataacctttcctttatcagactatgcctgacctaccgaacgcaggaactcgactagatactcatatgactgtgggattatctttcccaacaattccacgacatttggcagcatgatcaaaaagatgatcattcctacagtagatttaagagacaaacttaacatcagcacgttcatttgcggcacagaccgtgacaagatccccaatacaatatcgatcaccatcacagcaatgatcaaaggtgcagcaacattaaaagccatggcaagggtcttactagtcaaaatgaccacacccttaacacttgcattcgtcaaagtggcggttcctaaaggaacaatcgtaaaagatagcatcacagcgcgaaacaattccagatgcaaatttaacatgaagaaaactgccagtgccaaccagtagtacatccgaccaaattgtgaactggaaacttccattgtcctgtcataagcctggcccatcgaaaaaccattttgaaaatcgatcagggaacccgccatgatcacagcttgaaaaaccagttgactaacatagcccatggcaagccccaataaagtctcctttaaagccgccaaagcgaagataaccacactcatcgccttgaccttgccaactaaaggaatggcagcaactaccaaactccccccaacgatcagcttagcagtattaggaaaacttctttgtgataaaatcggcgctgtgaccataaaagaaaatatccggcaaatcaccaaactaactaattgtacttcggccactgacgtcacacccccgagatcaagcggaagatatattccgtgaattcttttagcgttgtgatcataaagtttccagccaagatcagggtcacaaaaattgcgaccaacttagggacaaaactcaaagtttgttcttgaatctgggtcgtagcttgaaagatactaatgaccaaaccaacgaccatcgcaactatcacgattggacctgaaactactaagattctgatcaccgcttcacgcatgaccgtcaagactaatgaaatagacattaagctccccctctaactgaaactatgaaccaacgattcgactaacaagtaccagccatctaccatcacgaataataataatttaaacggcaatgagatcataaccggcgacagcatgatcatccccatcgccatcagcacactcgagacgaccatatctatgatcaaaaacgggataaatatcaaaaagccaatactaaaggctgtccgcagctcactaataataaaagccggagtaagtgtcgttagcggaactgactccacatttttatagcgatgcttgtctttagaaacatctaagaacaatttgacatctttttttcgagtttcttttcccataaattccttaagcctgacctctgaacggttgaatgcttgtttttcagtgatctcctgccgactataaggttggatcgcttctttatagatatctgtataaacaggcttcatcgtaaacagggtcaaaaacaaagccaagccaagcaaaacttgatttggtgggttttgctgcgttcctaaggcacttctagtaaatgaaaggaccatgatgatccgtgtaaaagatgtcatcatgactaacaacagcgggaccacggataaaatcgtcatcatcacaaacacattaacgatctgcgacgaatttccgctctgtccactattgatcaaatcagtaatgccacgagaaacatcatcgaggccagctgcatgcactgaaactggtcggaacaagcaagccgttaaggacaacccgctcagtattttactttgctttttcgtagtcattacttctttctcttattctgcagcttgatcgtcttttgcttgagaatggccgcaaaatctattttttcactcgcttgatcatctgaactggtaaataattgctcaacctcttcttttgataactcagagatcaccgtactgccttgttctgccaagctcatcaagtaatagcgctcgatgacttgcacgatcccaagtgcggaagtttttgaaactgggattttcttgataactcgaaattgccgatcctgtggagcaacgaatttctgtaagtattttaaaaataagttgatcaaaacgatcacgataattaatccaaccaccattttgatcaacgacaacgttaactccatttgaatactcctcgtatgatttaacttattggatcacaaaatctgtcacataaacttcttgcactattgaactgccataatttttattaatagcctctttgacttgttctttgacctcatcgatactttgattatttttcaataaatctgcggccctttttggtttcaaaacacggatcatgctgtcacgcactaaaggcatgtctttttttaatgcttttgcttgatcatcgtcagccactaacaaagagacctttaagcgtaaatattgtggatcagctgcatcatccgttgccaaattaacaataaactttttgacgtttaccagacgctgtcttttagaaatggcagctcctgtttgcactttttcagctttaggttttgcgtcttgactattaaagtacttgtcggaaatgatcgtgccggcagcactagccccaaatgctaaaacgactactaaaacaataagcaatccccatttgatgccacctgctttagtttcagttgtttctacttcttcattcttcttcattgtttccctcgttattcccttcaaaaagattctcaccagaaaaaattcggtgacgatattctatgatcgcttccctaatttcaaacgctgtgtctctaactaccagcgttttcccatcgacaagcgtgattactgtatctggggtttcatcaattcgatagatcaaatctgggttcaaataaaattcttttcctttaaatgaagttaacaaaatcatgaacctgccccctattatttatcctgtacataaaataaaaattttaccttacaggttctttttccccttttgatcaaattgctgcgctcactattctaggacagctcctcaagccaggactttccgtctaaccaacttccacacacaatgctaaaaaacgcattatggcctagaagtccgttagtactcgagtcctacccggcttacctcgctcactatcttaggacagctcctcaacgcaggagtctgcgcctatctagtttaaacatcacggtgccaaaaacgcaccatgatgtctaaacccgatattgctcgtctcctaaccgcgttgtttcgctcactattctaggacagtttctcaacgcaggaatctgcgcctatccagtttaaacatcacggtgccaaaaacgcaccatgatgtctaaacccgatattgctcgtctcctaaccgcgttgtttcgctcactatctctttaggttgatcaattcttgcaacatctcgtctgacgttgtgatactccttgcattggcctgatatgctctgcttgtaacgatcatgtcagagaattcttgcgctaagtcaacgttagaatcttccaatgtccccgctaataaagtgttggtcccatctgtaccaggtactaaattattggcattaccagaatcctgtgatatttcataagtgctgttaccgatcttgcttaagccggctggattactgaacgtagcaatcgacactgtaccgatcacttcatcttccgcgccataacgcgcagtaactttgccatcaggaccgattgaaacgtgaccttcaactaacttttcaccagctgcattttgagctggtactgtaattcgagttaacgctccgccttcctgtccgggagcatagcccatcacacgtaaaccatcagcattagtcaagttgccattagcatcgatcttcaaagcaccgttacgtgaataaacctgaccattattaccatctcgctcaaatactaaaaacccgctaccattgatatataagtccaaagcacggccagtcgtgttttgaataccttgacccatgtctgtatcgatcgcaccgacctgaaccccaagtccaacttgcttaccatcaataccgccaacggttgcacgtggtcctgaagcattcgcagttgtctgacttaaaatatctgaaaagttagcacggcttgacttgaagccgatcgtgttcgcattagcaatgttgttggaaataacatccaacctggtttgttgactcttcattcctgaaacacctgaatacaatgaacgtaacatttaaaattcctcctatttgtgtagcatctttttaaattttgctattttttaatcttttggttctctaacttctttgatggcacccatttcatattccgtaccgttgacggtcagcttggcaataccgccagtaaagttgactttatcaactcttccttgcttttcattgccttgttcatcaacaactgtgacatccttgcccattaaattgaaagcttgttgttgctgccctaaaagcaaagaattattcatcattgtcgacatattatttaattcctgtaaggtagcaaattgtgccatttgtgaaatatgatctgtaccactgctattggaatctccatctccggtcatggaagggttagacattgatgtcgctaagatcttcaaaaaatcatccattgaaagtcccaaagcatttttagcagcaccgttttgtgaagtactttttgttatctcactcgaactgccaagactgtttgcttgtacaccgcttaaattgtccatgaaatatattcctcctttgatcacgcatactctgagacgctcaaaccaacaaactgatcgttccgtgcttgatttgttcttcgcctggcaaatgttcttcactgaccacttgtgtcctcgtcttgtgcgaacgtgcaaatcggcgttgctgttcttgctcattttgcatgaaatcaccagctggaccatctcgctgctcgcctaaaagttcagaagtttccgccgtttgtctcacagtttcaacttgtttcaatgttttagtcgttggatcaagctgcagctgctccatgatctgctctaatttatgtgtgattttttgtaacatatcacgtgcagtactattttgaacttcaaattctaggctgactgcctgttcattcgtctttaccgcaactttcatctcacccagattagccggtttcaaattaaaaactatgctctgggtattgcccttactggataacaagcttttctcaactactggagtaagtgctttttgcaaatttctcacgacctgctcgaccggtctagttatcgttgttactttttgccccacattagcttgcgtaactgtcgcgcttttttgttcaactacgcttaccatacacgttctatctgtaagctcactaaaatctatgatttcagctgcttgtttttgtcctgctagcgaagctttcgtaccgatcaagatttttgaactaactgataaaatttccgctgactgttttagcgacgatactgaaagctcgtctgccatcgctgcaacttcaggtgatgttttaatttcttgtttacccagctgccctgctttagaaactaacgggctctcaatgatctttgtaggttgaaccgactcaacttccagatcagtctgctgagcagcttcctgcttgatctttgtgtccgaactcacaaccagatttattgtcgagttagattcttgaatagcctggctttcaccagctgacttagaagttaccatactaacaaagtttgctatctgttccttcaaggtcgcttgctgggttgcagacatttcatccaagtcaattacgctttgtgccggattttcgccaaattgctcggtttgttgtggtgcaacgtcattgtctgcaataatttcggctatcggtcctgccttggcttgctttaagtctagtggaggagcagcatccttaggtaatttttcattttttccggcgttatcattttcttggagcggttcgactgcttctgattggtcatgctcgatctctagtaaaatattttgctttttcaaatgatcgctactgctaactaattccttgagtccttccagcaaatcaggcgatatttggacttttccttgcttgaccaagtcatccaaagaaactgtaccgtttactaactgttggaacgttttcgagtcaatttgcaagacttgctctagctctttttttgtttgcgaatcagtagttttaatatgtatgttaagcatgtctttagaagtctctagtcgatttttagcctttttttgtctgaaacctttatcatcattaaccgcaatttccggcttatcttgtgctaaaaaagcctgaaatttccccgtttgttttttggttggcttggctttagcaacctgcaaaccagcaattttcttacctgtaactaccttttgcatttcattgtcctcctttcaaacccttgctttaacgtcaaggtcaagcgatatttacattttgttgtggccggtgaaaatcatccaactgcttttgttcctcatgggctagctccttttgatattgtgcaagctgctttgttttaagccgctctaatattttccgttgtttctgtgcttcgatcaattcactgcgaatttgctctttttgtgcttgcaaccccaacagttgatcgtgacaaatcatgatctggtcgttaagagcttgaatatagcgtcgtgtgacttgcattctgctaactgaaaattgtggagtttccatcatgctgtctttttcttgcatgacttgatccaattcagtatttttctcgttttccaggcggttgacttcagcaaaatgccccttgacctggtcttcaacttgcaaacgatattccagcactttttgtaatgaaaaattaaattcttccatccctgatctccctacccttctgcagtgatccgaccgtcacctaaaacattattcgaagcaaacaactgctgcaatctctcctctgtatctgtgaaacttgaaaattcatccacggcttgttgcaaaaagtcatcgatcggtttgtgcagctgcacagcatagtcgatcacaggatttgttccgctcttatatgccccgatatctatcaaatctttcgcatcagcgtatgttttcaaattttcacgcaattcactggcatggatattatgttcttgagagaccaacgatttcatcaaacgactgacactaggttgaacatcaactgccggataatgattttgggccgcaatttctcgcgataaaataatgtgcccgtctaagatcccgcgaactgcatcagcaatcggttcgttcatgtcgtcaccttcgaccaagaccgtataaaatgctgtgatcgaacccttgtcagacattccgcttctttccatcaacttgggtaattcggcaaaaaccgaaggagtataaccccgggtagttggcggttccccagttgatagaccaatttcacgttgagccatcgcaaaacgtgtgaccgaatccatcatcaaaacaacttttttgccctgatcacgaaaatactcagcaattgccgtggccgtatatgcacctttcagccgaactaagggcggcatatcagaagtagcacacactacgatcgacttagcataaccttcacccaagtctttttcgataaattctctcacctcacggccacgttcaccgatcaaaccgatcacgatcacatcggcctgacaatacttagcgatcatccccagcaaagtacttttaccgaccccactgccggcaaagatcccgactcgctgtccctcgccaaccgttaataatccatcgattgctcgaataccagtcggcatgattttttcaatgtcttgccgtttaaatggatctggggcttcctgcatcgctggatacccgaccatttcagactggtcaagcttggaacctttcaatggacgtcctaggccatcgaaagtatgtcccagcatttttggcccaaccttgacttcaagtgtcttgccagttgcagccactaggcaacccggcgcgatcccctctagctcatctaatggcatcaataagaccgtttgtttaacgaatccaacaacctccgtcactgtcttttttcccgcttttttcgcatagacctcacagacttcaccgacgaaggcttgcaaaccttcgactttgatcacaagaccaacaacttcgctgactttgccgtataccgaataaaaaggatattttttcgcttggtttaaataatttttaaaggggatctttatctttgtcatttatttacctcataattgttccagaaaaccttgtaattcctttttaatgtcaatatcaactaccgattcgtttgattcgacacgcagctgcaaagcatttaaactatcatcatcaaaaattatgtaacgcagatcaggaatttcttctttgacctgctctaacttagtggtcagtgattcatgataagcggagttagcccagaccatcaatacttcatttggtttttcgagttcgaataataatggactcaaaattgcagtgatcttttctggcgttagttccaactgcgtcttcaaaataatttcggccaactgtactgcaaaagaagtgatctcatcctgtttttctgccaggtactgttttgactctgccagactttgctccacgttatcttgtgcctgcttgactagaggtgccattttttgttgtccttttgtcacagcctcctggtatccatctttttttccctgagcataaccagaatcataggcttcttgcttgatttctgctgccttttgttttgcatctactaacatctcagctttcagctgttttagcttttgctggtaagctgccgtctgatgtgctaatttagcgtcaagagctgttaactgtggatcttgcttttttatttgaggaacaaaatctgctgtctttataccaactttcttaccatgcaggggcattgcctgctgtttcaaaatattattagacaatgctgtcttgacctcctcgaccaatatagatctcgcctctttcgtctaacttccgaataactgcgacaactttttgttgtgcttcttcgacagctgataatctagttggacccataaattcaagatcttctttgatattttcaaccgcatgttgtgacatattaccgaagataaagtctttgatacgatcatcgctgcctttcaaggccagctctaatacatcgtttgtcacatcacgtaatactttttgcacatccaacgcttgcaaagtagtaatatcttcgaaagtaaataggttggcctgaacttcactggccaattctggctgtctgctttccagaccggccaagatcgtcttttcagtactgcggcccgttgaattcaagatatcgaccaatgcgccgacaccaccgatactctcacgttcaccatcaaccacattggaaaacttatcttccataactttttcgatccgctgaatcgtttctggtgaagtggccgaaatcgttgccactcgttcagctacatcagattgcaattcatctggaaattctgacaaaacactggcagccttctcagcctgcatataacacaatatcaaagcaatagtttgtggatgttcttctactagcaaattaactaattgctgctcattagcacgacgggcaatgttaaacggttgttcccgcaactggatcgtgttcaaaacatccagaacttctttggctcgttgcggccctaacgaattaactaaaagatcctttgcgtagtcgatcccaccatccaaaacatattgtctggctgtggcagtgtcgacaaattcatcgatgacagcattcttttcttctggagtcacataatctgtattagctatttcataactgactttttgaatcatactgtcaggtaaaagtttcattacctgggaggacgcttctgaccctaaagagatcattaagatcgccgctttttttactccactcaattgagccatctcttatttcccctcctagtgatgatctttcatccaagctttcagcaattcagctgtaactgctggattagtctgggcataatctttagcctgtttatccttagcttgtctttctttgacttctggtttttcctgcagaggtactgctttttcctcttgttttgcttccggtaacggctcactattcgctgaagaagtaggtccaggttgtggtgaatcatcagttacatcgacatcataatcatcatcgtagtagtcatcatcgtcatcttggcgtttcttgcgaatgatcaaaaaggctgcgataccagcgattgcgatgacaccgatcggaagggcgatgtaccaccacggcacattattcttcaccgtcttagtcttatgaacttttggtgtcgtgtctggaacatctaaagcttgaacagtaactttatcaccacgatccttatcgtaaccgatggctgaacgcacaatacttttgatctgcgcctgctggtccccactaacatctccacgaatagcaacagaggtcgttaatctcttcacagttcccggtgcgctaacttgcttagtcacatcagtatctaattcattattgatcgtccggctatatgaagcgccattatcggtattatcgccagttacgttagagacattatcatcggtttgaccagtctgtgcttgttggatctgttcttggttcccattagcttgaacattttcactccgtaaatttggattgctatatttcgtagtcttgcgttccagtgcgtcaaaattaaggtcagcgttaactgcgacgctgattttgtttccatcagctaatgggcccaaaacacgtgtgatcttcttttcaagttgtttttcaaactgtttttggatctgcatatatttactgttcgcacctgtcagatcatcattgtcattattcccatcagccaatacatttccattactatcaacaactttaacgttttcggctgttaatcccttaacggcacctgtggtcaactcaacgatccctttaactgctgaatttgagatcgtgttgccattcaacgtcaatgcaaccgatgctttggctttttttcctttggcatcatcactaaagacatcatcatcaggcatcgttaacattactttagcttttttgacagcatttaaagaaccgatcgaacgttccagctcaccagtcgttgcccgctgatacatgatcttacggtcttcatcagtggtcatcatgctggtatcatcaaataactcatagccttgtgaactatcgggcagtttgttatcgacggccatatcgatccgatactggtcgacttttgtcttatcagctaagatcgttttaccatcatcttttaacttgtacttgatgtcttgatcttccaaatctttcgtaaccgtcccagcgtctgcgtcacttaaattcgaaaacaaaacggcatactcaactctggtgttcagataatatacgatcccaccagcagcaagtatgctgatcaaaccagctatgatagcaatttttactaaacgatttagattagaccatttgtcttttaagtttccaaaaaagtcctttactttatccacttccaagcccccactacacgactaaaactgcatgttcttaagatcgttataagcttccaaagctttattacgaacttgaactgcagtctgtaaagttaattgactttcagtcatattgatcatgacctgccctaagtcatcttgttttccactgatcatatcggtagtcgactgatccataactttcatgcttgaatttaaaccggataaagcatgatccaaataatcaccgaatgttttaccggcgcctttaactgtctgatcagaattatcgagtccagtaactttgcgcagttgagtagcataattatttaagccgttaataccattgacctgtgccattttatctctcctaattttctgatatttctagtgccttactcaagatctgcttattgacctgactcgaagcaacatttgcttcgtaagatctttgcgattggatcaagtcgatcatctcatccgccaagttaacattcggtaaatgaacataaccattttggtcggcatcggggtcatctggtttataactcaacttctcagtttgatcctgtgcaatgccagtcactcttacaccggaactctgtcgtttgttggcttccatgatatttccattgtctgcttcgacttgacgtaaattttcagcgaattgaactgacttccggcggtacgggccaccttccggcgttcgtgttgtattgacgtttgcaatattagttgatgtcgtatcaagctttaaccgctctaaggctaagccgctggcattgatctgcaatccattaaaaatactcactctgatctcctcttctccaatttagtcttaccattaatgattcaaaacataactcatcatttggtaacgccctttgagttgtgatgtcaacgcgctataattcaaaccattttgtgcctgatttaacatctcaacatctaaatcaacgttattgccattttctttaacagccgtatcattgcgcacgctttcatgcggttcaattgccccgcctgcttgcatatgcattttagatgtagtttttaggtgtgtttcttggtccaaagcattattcaaaacactttcaaactcgattcgtttagctttgaaacccggcgtattgacattagcaatattatttgcgttcaattgtgctctattagaagaaacgtttaaagcttctttcattaagccatatgtattttccaaaattaattacacctattttctttgatttaacactaatattttcaaactttttatatttcaattttcatagtagttgcttgcagccaagatgtcccctttatcaaactttttctatatttttcacagcattataattttagctgttaacatactcacaatcaagttaatttttaagttattttcaattaaaatataaaatttttaatttatctttcgccggatttttaaactatttaaaatatacgcattttattcatccacaaatgttatagaattaaggcaatcaagtaagtgttttaatcctaataaaaatagtgggtacaataaaatgacgatttattatttaaaaccagaaaaaacagtcgatgaaattatcaatacattgcacgctagtgttgctagcatgcaatattttgaaacgctagatatgatttgcgaaaaagttgagtttaatcttgatgaagccgcgctattacaacgaattaagcaactagccgatgattaacgcgcagatttggaaacccttcattcaatcggggtttcagaaaatgatatcgaccgtttaaaagctgcaggtttattattattcgttcaggataatgagattccacaaagctatgtgacgctcagtcggaaagcattagttggtttgcaagagattgcagcggcttatgctcaagagtctacacagctaacaatgaatattgattcaaaagaaattcaaagcttaaaagcagcttcagataagtttttcagaaagtatcaataagaaattgaaaaaagcccatcgacatttatgtcgatgggcttttttgtttgccgcaaagtagcgcttggctatgcttgaacaaactttttaacgggtcctaataggtctgggttgatttgtgcacgaatcaacgtgccatcttcttcatagctttgtttagtgatattggcacgatcactgaggtacgaaacagcttgcccttctgtgtatgggactaagaagtcgagcgttgggtattgttcaaagagttgtttgttaattaaggcaatcaatgcatcgattgctacttcgtcgcgagctgaataaacgatttggtttccgtctacttcaggatagcgcgtatctggtttcaaatcagctttattgtaagcctcgatgactgggatatctttaatgttgagtgattcaagggtttcttgtgtcgtttccatcatgtccaagtagtttggatctgagtaatcaaccacgtggattaaaagatcagcactcgctgcttcagctaaggttgatttaaaggcttgaattaagtgatgaggaagttttgtgacgaaaccaaccgtatcactcaacaggaatttctgttggttggggaggacgatttcgcggacactcgtgtctaaggtggcaaagagcatatccttttcaaaaacttgtttttcaggtgtatcggggttcaaccgttgtaaaattcgattcatagtcgttgatttacctgcattggtgtacccgacgagtgcgacaactggaatcgcatttttcgtccgttgacggcgttgtacgagttgttgttgatcgattttagcaagttcggctttgagcttcgtaatccgtttttcgatgagtcggcgatccaattcaagttgggtttcacccgccccacggttcgcagtacccccgccaccttgttgatccaacttgttttcagaaggatggaggcgtggtaattggtatttcgcttcggcgatggccacttggagttgcgcttcttttgttttggcacggctagcaaagatttcaagaattaattgcgtccgatcaagaatgcttattccgagttctttttctaaattccgaatctgtgaaggtgaaagttcatcgttaatcaagataatgtccgcatcttcagcgacggcgcgttctttaatttcttgaaccttccctttaccaaaataagtggcgtgattagcttggtcgatattttggcgaacgtcaccaacgacttctaagttatcggcacgggctagttcgcccagttcgcgcattgtatagtcaaaattaacttggcgttgactaacaccagtgattaaaacctttttaggttgcatataagtttcttccatgagatctcctttttgtgagagtgcgtcttcaaatggtcagccgttgaggattagcaatatctcgtaaatgagcggcaacgccgattgtttacgagatggcgctaaacgcagacggctatttgaagaaagcacgtttaagataagagtgcggcaccggcggttatctgctgaggattagcataggcagacgaaaaaccgatttgttggttatttggctgacgtagctaaccgagagcagatgcctggtggagcacgtttcaattgaaaaaaagggccatggcaaaaatattcttttgtcacagccctcagttaattaaatttaaaaagcgaatgccaacagaaatagccgcaaaatggccacatgattattcaattgtgattgcgattaaacaaacgttagttgacatgttgttgacgctcctttgatgtgaaatgggtggttacccaccttatccgttaagtgtaccatgaaagccattaaaaaccaaagttcgcctttagcgtgtacgccaataattaacactgttgtgggtgcccagcgtaattttatggtagaatgtaagcggttatcaaaatacataagagaatcgattgggggattgacgaatgaaaaatttagcattacttgatgttggtggcactacgattaaatatggtttatgggatggtgcggcgcaacaattgaccaaacaaggggctgttgccacaccaaagtcgttgaatgcgtattatgatgtgctgacgcagattgtggcggagtttaaggctagtgaccaagttgttggggtcgcaatgagtacgccgggtgcagtgaacaaggcgacgggtattattgaaggggccagtgcgctcccttatattcatcattttgaaattcaagatgaacttgaaacgcgctttgacttaccagtcgtaatggaaaatgatgcgaattgcgcggctttagccgaagtcggtagtggggctgctaaagggctaaaaaatgtgttgttcatggtaattggcactggcgttggtggttcagtgattgtcaacggacaagtccaacatggtcgccatttattcggtggtgagtttggctacatgatgatgaatgatggtcggattttaagtgaagtcgggaccgccgttcacatggctgaccgttataatcaagaggcacatactaactactcagggcgtgaagtttttgaattggctgatcaaggcgatttactcgcgcaaaaggaggcacaggtgctctatgataatctcgcacaagccatctataatttacaatatagttttgattcagaagcggttattttaggtggtggggtgtcgcaggccgatttcttggtgccaaatattgaaaaagctttacaggaaatactcaagcaagtcgatattgcgcctttcatgccaaccattcggacgtgtcagtatcataatgatgcgaacttgattggtgcaatggaagatttccgccgcacatatccgaatttagttgcaaattagactagtaaagaccgctttcaacatgtcataataaatattataaatgatattaggaggcggttaagatgcccacggaaaaacaagcattaaatcaaacgattggatttaccgcggcattagccactgtgatgggaacggtcatcggtgctggtgtgttctttaaagcggatcctgtgacgcatgcgaccggctccaccgggctgacaatgcttgcatggcttgtcggcggcttaatcacaatttgtgctggattgacagctgttgaattagcagctgcgattccagaaactggcgggatgatgcggtacatcgaccatacttatggtagtttagcggcatttttattaggttgggccgaaacaacagtctactttccagcgaacattgcggcgttgtcgattgtttttgcaacgcaatgcattaacttattcagttggtcagctcactggcagattccaattgcaatcatcgtcggactcagcttaacaatcttgaatttctttggttcccgggttgggggactattccaatccttcacaaccgtctttaaattaatcccgcttgcgattattattgtattcgggttaattcatccaggcagcaacgccgttcatgtgtcattatttgacgtgacccggtcaaatggctcggggagtttcctgtcagcgctgggcagtggtgttctagcaaccctctttgcgtatgatggctggattcacgttgggaatattgcgggtgaattgaagcatccggaacgcgatttgccgcggtcaattttaattggtttaacaggaaccatggttgtctacctcttagtgagcgccgtcttcgttcttgtgttgccaatcaatcagattgccggcaatccgaatgcggcttcagaagtggctcgagtgctatttggtggtgtgggtggtaaaatcatcactattgggattttaatttccgtctatggcgggattaacggctacacgatgactgggatgcggattccttatgcgatggcgctcgagaatcggttaccattcagtcgacaactgcgctccctttctaaaacaggcgcgccggttgtcagtggtttagttcaaattagtatcgccatcgttatgatgttcatgggtggcttcaatacattgactgatatgttagttgttgtcatctggattttctatattctaacgtttatcgctgtgttcattctgcgcaaacgtgaaccagaattaaaccgtccgtatcgcacacttggttatccagtgattccagtcatcgccattcttggtgggattttcatcgtggtgaatacattattcacacagacgatgttaactttaatcggaatcggaattacattactcggattgcccttttattactatttaaaaaataaatatccagtcgtttaacacaaaaaacgaagttcgtgaattaactgaacttcgttttttttgtggccaaaaaccaattgtagcaacggatagacgaaaaataaaatagttgcgcaaatgaattatcggcattaattgttgatttttataaaaataaactaggtcataactcatgagttgtgaccccttcgcatcaaaggttcttattggcgttttcagaaaatgcgtaaatttatctacaaattaaaataatccgaaaaacatcgctcaaacattggttttaaaaggtttttaatgaacgattgacaattattgtcgcgtgaaatatacttgcacataaccaaacaatgatataaactaaccttaactgctgcttaatcaagttgaaatgagtcgctagtttgttttaaataaatgattgtcggcttttgactagccggtggtcatttattgtacataagttaaaactatattgaatggacggtggagggttgcagatgccagataataaaagaatattaacaattagtgagtggtatctggagtgtcagaacatcacgactcaattgaataaaatgagcgaaaaacatggcttaagttatgatcaatttctcgtgttggaacagattgtggaactaggacggaacaccccaggccaaattgcagtcgtatttgggacctccgcaccagcggcttcccgtaaaatcaatacgctacaaagtaaaaagtttattcgcaaaattcgtgatatggaaaatgaccaacggaatgtttggttagaagcaactgaagaaggcctccgcaagtacaaagcgctaaaaaaagatattactaagcatactggcatcaaagcaacggacttggagtacttacggcagataaatcaaacaattatagaataaaaaagggaaaggccatcatctttagatgatggccttttttaataccaataaggtaaatcgtaatcattttatgcataaattggtataattgtgaaagaatataaaaagttgaacttaaggggtggagaaatggcaacattaatggacgtcgctaagcgggcaaacgtttctaagatgacagtttcgcgggtgattaatcatccggaacaagtaacagatgaattgaaggaattggtgtatgccgcaatgaaggaattggattaccgtcccaatttaattgccaaagccctagtcagcaacagtacccgaatcatcaaattgtgtatcttggaagacatcgacgttaccgaaccatattacatgaatctaatggtcggaattgctaaggcacttgacctacatcagtattcgctgcagttagtaactcggcgtaactttgatatcgggaattgtgatggctacattattacgggattgcgtgaaagggatgttgcatggattcgcgatctgacaaagccagtcgtcgtttttggggagaatcagtacggttttgattatgtggatacaaataaccagttggggacctaccttgcagcgcaattagcattagagcgtggttatcgccagcttatttatattggaatggcgagtgaagaagcgtttgaaaaatcacgtgaagccggttatttacaattaatgcatgagcagcagcgtcctgttcagttacaccattttaacaaccatagtcatttgaccgaagcctacatcattgaacactgggcgcaattcaaactcgagactgcgtttatttgtgccacggatcgtctggcaattgggattgaacgggggattgcgtcgtgtggtggtcatgtgccgcaagagtttgggattacaggatttgatggggtctttttaaatcaagttgcctctcctaagttgacaacgattaagcagtccatcattgaaatgggccgtgcatgcggagagaatatcctcaagaaaattaatcaggagtggattgagcgaccattgatattcgaaccacacattgaaatgggcgggacaattcgccctgtgctaaaagaacaatcggaataagcataagaaaactgttaccggtaacatcaggaaaacatttgtaaaagcgttttcaaagtacgacaataaaacttgtaaacagcactgataaaaatttattggaggtcgttatagtgaaaaagatgtggaaaaagctagggttagtttcgttattggctggtgtaacgttaacattggctgcttgtgggagcaagagtgcggatggcggcaatgtgaaaatcacaatcctacaaggaaaagtggaatccaacaagcaattcaaagcgattgcgaagaagtatgaaaaagcacatccaaacgtcaagattgaaatcacatcaatcggtggtgggacacagtataatcccgttttgaagacgagaatttcatccgggaatgcacctactatttttagtttagatgggccagcatcggttaaacaattcaagaactacacggctgatttaacggatacaaaagctgctaaggccgctattccaagcacactagatactgttaagtcacaagggaaagtttacggcttgccatttaacattgaaggctatggttttgtttataataaagctgtcttcgaaaaagccggtatcgatccaaagagcttaacgacttacgataaattagaagcagctgttaaaacattaaatgaacaaaaagaacaattaggcattaaaggggtctttgctttacctggtaaggaatcatggattctttcagatcatttgttgaatgtttatctaagtaaagaatttgatggcaatgcacaaaaattgtatacctcaaagaaaatgaagtttgaaaacaatgcagaaatgaaacaaatgattgatttgcaaaaagaatattccgttcaaccagtcatgcaaatggattacgcgggacaagtgaaccaaaactttgctcaaggaaaagttgcgatgattcaacaaggcgactggatttacgaaaccgttaaccaaattgatgcgaaattcgctcaagacgggatcggcatgattccaatgccagttaaggaacaacaaggtaagatgcctgttgggacctcaatctactgggcagttaataaacggaagagtaccgacgaacaaaaagcagctaaggacttcttgaactggctatatacgtctaaagaaggtaaaaaagacgttgttgagaaattacatttcgtacctgcttataaaggttacggtgatgtgaagatgccagatgcactcacacaatcggtctatgattacagtcaaaagaaagcaacattcggctgggttttcccgggttatactggcacatcatgggatccagacgttgcccaacctaacctacaaaaatatctatcaggtgaccaagattggcaaaagactgtttcaaatatgaaggacggttggacaaaacaacaaactaaataaatttattcaattggataaaacaaaaagagggtattgaaatgaaaaataagagtttatcattttggttatttttaacccctacccttgttgcattagcattagtcgttttcattccaatgctggagggcctattctattcattcactgactgggatggactctcttttactaaggtcgttgggtttaaaaactacatggccttattacaagataaagcattcggaaacgccttttggttcacggtagcttttgttatcgtgaccgtcatcttgctaaatgtaattggcttggggttagcattacttgtgacacagaaatttaaaggcaacaatttcttacgagcgatcttctttatgccaaacatgattggtgggttaatcttaggatttatctggcaattcattttcacgcaaggctttagcgctttgggatctgccttacacatgactgccttccaaaactggttaacgaattcactaactggtttttggggcttggtaattgtgacggtttggcaaatgagtggttacatcatgattatctatattgcttacttgcaaaatattccaagtgaagtgattgaagctgctgaaattgatggtgcatctgcttggcaacgatttacgcggattacattcccaatgatcgcgccagcatttaccgtctgtatgtttttaactctgtcgaatgggtttaaaatctacgatcaaaacttgtcgttgaccaacgggggaccttacaactcgacccaaatgttggcgatggatattgtgaatacagcctataattcgagtgatttcgcactcgctgaagctaaagcaatggtcttcttcttgattgtcgctgcgatttctttagtacaagtcttttataaccgtaaacgggagggcgatttctaatgaataagaaaagaaatagttggatcggcgtcctcggtgtattgattggtcttttatggttattcccattctatatgattctaacgaactcatttaaaacaccaaaaggcatttttgcctcagtattgtcgctgcctaatccattcacgaatgtgaactatggaaattcgtttaaagcattgaatttcattagttcattgaccaattcgctcattattacagtctgcagtgtgttgctgattatcctatgttcttcaatggcagcctatgcactgcaacggaataaatcgaagttgagtagcagtttattgctgcttttcatctcagcgatgttgattccattccaatcagttatgattccgttgacggcaaacttcggtaatgtgcatctgttgaatatgtacggcttgatgttcatgtatttaggcttcaactgtagtttatcgattttcctatatcaaggcaccctttcaagtattccgattgcaatggatgaggcggctgaaatggaaggtgccagtcggtggcaaatttattacaagatcatcttaccaatgttgagtccaatgactgtgacggtcgctattttgaacatcattgcgatctggaacgattatcttttaccatcattggtcttaccacaagcgcaatatacgattccactacaaatgtttaatttcttcggagaatacacgaaacaatggcacctcgcattagccggcattaccttgtcgattattccggtcattgtcttctacttattcgctcaaaaatggattatcaaaggtgttacagatggcgccgttaaataattaaggaagtgttgatcgtgaaaaagcacagcgaaacaagacaaacgttattggcagccgggaattggttatggtcgctttttaccatcaaccttgcttggtttggaattaattttcctgtcattctgacactgattttaacgtttagtatgccaaacggccgagtaatgattcccggtgcagttgtgctagtgttaatgctcagtttgtttacactaccaagtttagtcgcggtttttagagcggtagaccaatggcaagttaacggtgatggtaattatgcacgcgttgtgttaaaagggtggcggcaggcactgccagactttttagtgaatctgacgttagcgacggcattgatgatcatcgtgttgttactaaaagccagtgtaggcgatattttagttcgtagcggcttattggtctggtttggggcgttattgctagttgtcgttgccagaagctacttggtcgggttagcgcgccatgatgttaccttaggcggctttatcattgccaatgggggcaaattagtgctagccaccggcgttttcatcttgttgatgggcattaatgtctttttaaaactcgcgtttatgattcttgttgcgagcgtttcgttggcagccttcattagctatcaattattgaacggtgcaccagttaaaaacgaagtaagggagaaatgatcgatggtcgaaattaatttaaatcatatcaataaaaaatattcaggaaatgataccaattctgtcacagatttcaatttgaaaattgcagacggtgaattcatcgtatttgttgggccatcaggctgtggtaaatcgacaactttacgaatgattgcaggtttagaagatatctctgatggggaatttaaaatgggcgaccgagtgatgaacaaggttgcacctaaggatcgagatatctcgatggttttccaaaactatgcgctctatccccatatgacagtcttcgataacatggcgtttggccttaatattcgtaagaatgataagcaagataccaaaaaacgggttgatgccgcagcagaaatcttaggtttatcggagtatttagatcggaagccatcttctctttctggtgggcaacggcaacgagtagctttaggacgagcaattgttcgtgatgctaagttgttcttattggatgaaccattatcgaacttggatgccaagttacgggtgcaaatgcggactgaaattgcgcaattacatcaacgcttaggtcgtaatttcatctatgtgacgcatgatcaagttgaagcgatgacgatggctgatcggattgtcatcatgaacgatggtaaaatccagcaagtcggcaagccaactgaactctataatcatccggttaataagtttgtggcaggctttatcggttcaccagcaacgaatttcttcacggtaaccttaactaatgggcatctagtgaatgacgatggtctaaatatcgcagtgccagaaggtcagttgaaacagcttattgccggtggctacgatggtcaacaagtgatcttggggattcggccggaagatattcacgctgaagaaattaccctccaaacattcccagatgctaaaataacggcagaggttgtcgtttccgagttattaggggctaacacaatgctctactcaaagattggacaaaccgattttatcgctgaagttaattcgcgggattatcatgaacctggtgatcgggttgagatggtgcttgaaatgtctaaagcacactacttcgacattgcaacggaagaaacaatctattaagcgctgctaaataggcggaatgattttggctgacgtatcggagggaacgaaatggagagaatttttgaagtcgatccgtggcagattgtcacgcatcaactagatcgtaaacataaacggctacaagagagtatgacgagtatcggtaatggttacatggggatgcgcggcgtattcgaagaggattattcaggagacagcctgcctggcatttatctcggtggcgtctggtatccggataaaaccgtcgttggctggtggaaaaatggttatcctgactattttgggaaagtgatcaatgccatcaatttcatcaaaacgaatcttaaaattgatggtcaagcggtggatttaggcaaagatgaagtgaccgcatttaagttggcactcgacatgcataatggggtgttaacccgccaattcatcgttactaaaaataataaacaagtgcaagttacgatagagcggtttgttagtatcgttcaaaaggaattatgcgcattgcgctacactgttgaaaacttggcgagcgaagcagttgagattgagattagttctatgatcgatgctgatgttcaaaatgaggatgcgaattacggtgagcaattctggcaagtgattgagcagtcagacgctgcggatgacacttatttggtcggaaaaacaatgcccaacgatttcggggtaccacggtttagtgtgggggttcaaattgatcatcaaacgacaatgatggcagatactgggcttcaagaagcccaccaagttgggcaacgttttaaacagcaattggcccctaaaacgcaattgaattttgaaaaacgagcggtagtggtgacttctcgagattattcagagttggacttggtaccaaatatgcaacgtatcaagcaggtcgttgcgcaacaaagttaccagcaattattagcggcacagacgaatcaatgggcgaaacggtggcagatggcggacgtggtgattgccggtgatgatagtgcccaacaggggattcgctttaatttatttcaacttttttcaaccttttatggtgaagatgagcgtctaaatatcggtcctaaaggattcactggcgaaaaatacggtggtgcaacttactgggacacggaaggttttgcaatgccgctttatctctcattggctgatccgaaagtgtcgttgaatctattgaagtatcggcataatcaattgtcgggtgcagaacacaatgcccggcaacaggggttaaaaggcgcgctctatccaatggtgacctttgatgggattgagaaccataatgaatgggaaattacatttgaagaaatccatcgcaatggcacaatcgcctatgcaatttataactacacacgttacaccggcgatgagacttatttgctcaatgaaggtatcgaagtgttaactgagattgcacgcttttgggcagaccgtgtccatttctcacaacgtgcgcagcggtatatgatccacggtgtgacagggcctaatgaatatgaaaacaatattaacaataactggtatacgaatttattggcgcaatggacgcttagttatacgattgaaacgctcaaaaaagtaagcgataacaaaaaagcggatctgagactttcagatgcagaactctcacaatggcaagcgattattgaaaaaatgtacctgccacaagatgaacaactcgggatctttcttcaacaagatggctttttagataaagatatccagcctgtcagtgcaatcccagcagatcaacggcccatcaaccaacattggtcatgggataagattttgcgttcgccgtacattaaacaagccgatgttctacaaggcatttggtattttatggatcgtttttcagctgctgaaaagaagcgtaattttgatttctatgaaccgttgacggttcatgaatcaagtttatcagcggcggtccatgcgattctagcggctgatctgcattacgaagataaagcggtggaaatgtacgcgcggacggcacgcctggatctcgataattacaataatgataccgatgacggattgcacattacgtcgatgacggggagttggttagcgattgtgcaaggttttgcaggcatgcgaattagcgatgaaggacaattatcattcaaaccatttctacccaaaaaatggacggcttatgaattccatattaacttccgcggccggttgttgaaaattagcgtgacggccgaccgaactgatatcaaactactcaagggcgatcgtttggcaattcaagtcaatgatgcgtcgatgatgttggaataggaggttattatggacggtgtcttattcgatttagatggggttattacggatacagcccgatttcattttgcggcgtggcgtcaattggcgcaacaagcgtttggcgtcagcttaccagatagctttgaagctgagttaaaagggattagtcgggaagcatccttgcaacgaattgtggcctttgcccaacttgatggccagtatacggtggcacaactcgcagcactggcgactcaaaaaaatgaaaattacgtggctgctatcaagcaattaacggctgccgatattttaccgggtattcaaccgttgttagtagcattaaaagcgcgcggggtgccaatggtcattgcttctgctagcaaaaatgcgccactcattcttgatcgattagctttatcagcatattttacagcgattgttaatccgaatgacgtgcaccaaggtaaaccagccccggatatcttcatcgcagctgctcagaagattgctgttaatccgcgaaaatgcgttggattagaagattcagtagctggtgtggccgccattaatgctgcaggcgctgtttcggttgcgattggtcatgcgagcgaattatcagcagcggcggttgttgtccctacaacggcggcgttaacggctgatttgttagaacaagcctttgaacagtatcaacactaattaatcagtgcaaccgagccttcgggtgtgtgttggactggtttttttaaggaggagacaaatggatttagcagcgatttatcatcgaccagatagtgagtttgctttcttatatcagccagataggctacgggtacgattgcggacggcaagtaatgacgttgaagcagtgtacctagtgtatggggatccttatatattagtcgatggcagttggcaaccgaaaacgattcggatgcagcaaggcttaataacggatctcgcttgtttttggacgattgaactgaccattgatcgccgccgattagcctatgcttttcaagtgattggtgtggacgggaccagcactttttatggtgatcaggggcctggtccaatcttacctaaaacagatgcttgttttcggatgccctatttccaagaaattgatcgggctaaggtaccagagtgggtcaaacaaacggtttggtatcaggtttttcctgaacgatttgcaaatggtgatccgacaaatgatccagatggaacattaccgtggacaaatgaggcaccacaggctcaagatttctatggcggtgatttacaaggggttattgaccatttagatcatttggtggcgttagggattaatggattgtatctcaatccaattttcatggcgccttcaaatcataaatatgatacgcgtgattatcggatggttgatccacattttggcaatgacgagacgctacggcagctgattactgcttgtcatcaaagagggattaaggtcatgctagatgctgtcttcaaccatctcggcgatcaatcaccacaatggcaagatgtgattcaaaatggcgcggcttcaaggtatgctgattggttccatattcgggattttccagtgcgttatcagccaggtcggaatttcgaagatgctacagacattacatatgatgtctttgccacgacgccacacatgccaaaattaaatacggctaatccagaggtgcaagcttatttgttatcgatagcgcggtattggattgaagcatttgatattgatgcttggcggttagatgtcgccaatgaagttgatcatcacttttggaaaaagttccgacaggtgtgtgatgctgctaaacctgatttctatattcttggtgaaatttggcattcagcgcagagttggctcagcggtgacgagtttagtgcagtcatgaattacgcctacactgatgcgattttggattattttattcataaaaaaattccgctccaccaaatggtttcgaagctgaatcgacagttaatgctgtaccgggatcaaattaatcaggtgcagtttaatatcctagattcgcacgatacgccgcggttgctaacgatggccaacgacaatcgacgcttgatgcgtcaaacgatggcttttatgtatctacagccgggtgtgccatgcctctattatggagatgagtatggcatgacgggagtggacgatcctgctaatcgtaaatgcatggtgtgggatcccgtggaccaagatcaagccatgtatcagttcgttaagcagctaattgggcttcgccatggtaagcaaaaactattgtcggaaggacagcttgagtggttaattgagccgactcatcccgacgtcttaaaaatgactcggcgattaggtgagcaacaattgacggctgtttttaatgcaggtcaaacagccgttagtgttgcatcaatgaggacaccaattctgtctgaaggggttcagcagcaaacagcagcgaccatcattgaaccagatggctttatgatttattaacatttcccaggcaataaaaaaagattcgcccatatggggcgaatcttttttagttaggctgctcgttttctttggaattttgcaaccagtggtaaaatcacgccgaggcccattaaggcgactgagacgacgatgtttaagattaattcgtgtgtatatttggctgtgccaggtgtggcatcttgtgggaagatactgaagatcgttcctaatgctgtaatggctaaacaccagaagccaacgatgatggcccatggtttgtttttaatgtatgtgtattctgatgggaatttttcactattgaaacggacccgtaagaaggcgacaaagatgaaacaagttacaaatggtgagacgataccgttaatatttaacaaccaattgaagatgtcgttaatctcgggcagaaaggcactagatgctaaaacaaaggtacaaatcccagtggtcaaccagtaaccgttgattggaaggccttgtttattggtcttagtcagtgcttttggtaagaattgtttggcagtgtcggataagaaaatccgtgtgccgccatcgagtagcatcgctaattgagcgcccatgtaaatcgcttgggtaacagcgaagatgtagagtaagactttacccatgtggaattgttgcccaagggctaagaaggcgtagtatgaaccgttcatcttcaagtcagctggtaagtggttggcatcgaagaagacgccgattgctaatgagccgaagatggttaggaaggcggtcattagagcgagggccatcatggcttttggaaaatcttttttaccatctttcatttggccaacgtatggtgcaacaagttcggcaccgttcatggcgaaaattaagaggccgatggttgagaagtaatgtaaatcaaattttggaatgaaggtgtgtgcgtttaatggatgggtggcaacgtgaccaccgttcaataaaccaacaaaggtcattaggacaaagaggatggtcatgacaaacatcgcccccccaccaacgatactgagtacctgtagagacgatgtaaacttgtgttggaagaagatgaagaggatggtaattgcggctgttaaaagcgcaaaggaagcccgtgagagcttgtcttcaagatttccgttcccagtaataatccaaaagaaggaaacgaccattgaattagcaacatcgaccaagtatggcaaactcgctacccagtaacaccaagcggttaagtaaccccaaacatcaccgcttgtatggcgcatccaactggaaagaccgccaccgtctttactgaaagcagagcctaagtgaccaaccattaattcataagggaggacataggcgaatagtaagacaatccatgagaagacaactgccatcccttggttttgaaagttataaataatatcgtcaaatccaatgacggtcacaaaatccattaaagcaaggacttgccaggtaatatatttcttttttggttctatttcatccatcgtaaagaaaccccttttctgaaaattcacaatgtttttattataatcaaatcagaaagggaagacaaaacttttttgactgtttcacattgatttttaaagaacgggggaataatcttacaaaattgttattttagcccgttaaaatgtcatctaaaaagcgcgcatgccgttttaatctcttgtaagatagaattatcataaaatctggaggcattattaatggacacaccaacagtcgttagcgtcaaagacgttaaaaaaacatacggtaaaccaaacgaaaaacaatacacagccttaaaaggcgttacttttgatgtgaaacagggcgaatttgtcgggatcatgggggcttctggttcagggaaaaccaccttattgaacattttatcaacccttgacaaaccgactgctggccaagttgaaattaacgggcaagcaattaatgggttgaaagggaatgaattagctgattttcgtgccaaggaaattgggttcatgttccaagacttcaacttattagaaaacttaacggcctatgaaaatatggcattaccattgacgttacaaaatgttggcggtaaaaaagtccgcgatttagtcacatcaattgccaagacgttatcaatcgatagtttattaaacaaatacccaactgaattatcaggtggtcaaaaacaacgggtcgccgctgcgcgggctttagtccataatccagctattttattcggagacgaaccaacgggtgcgcttgattcaaagagtgccaaggaattattggatacaatggctcaactgaacgaagaacaacgcgtttcaatcttattggtaacgcatgatccattttcagctagttattgtcaacgaatcttgtttattaaagatggtcaaatcggccaagaactcgttcacggcgataagagtcgggaagccttttatcaagaaattttagatacattaggcacatttaaccattaggaggaagtctaaatatgttattgaagttatcattaaccggcattaaaggccgtttgaaagactatttagtgcttttttccggtctaattatggcaagtgccattttttacatgttcgaagcactggcaactaacaaaagtttcgttacgagtaactcgccaattagtatggcgggcattattttccaaatcgggtctgttttattagggattatcacattagtctacattatttatgcgaataatttcttaatgagcatgcggcgccgtgattacgggatgttcatgatgctcggcgcaaaaggccgcaaaattgcccaactaattgctgctgaaacattagtgattgggacagctgctactctcagtggaacggcgctcggggtcggattaacccaaattgttagcaatctgttattgtctcaaatggatattcagattaagcatttttcaccattttacttacctgcagtgttagtaactttgattttcttcattatcttgttcattattgcagcggtagttaatcaattccaacttttgaaaacaccagttttacaactcttacacgatgatcaacaaccaaatcgcatttcacaaaataaattaagccgtattgtacaaattgtcttgggcttacttttcttagctgttggttactatatgatgattaaagtcgcaacgttccaaattatgggcttagttgtggcattagtgacaattgtgctcgggacgtacttcttgtttaatgcccttttcggctggttgattacgttgctcaaacgtaacagcaagattcgtaatcgtggtttaaataattttacgttagcgcaattgagcttccgcattaaggattacaccaagatgctcgcattggtggcgatgttatttgcatcggcactaggcgcaattacagttgggattggctatcaaagtgaaattccagaaatggcagaaacaatggcgccttacgacgttgttttaaatcaaccgaaccaagaagcattgcgcctcacaaaagatttaaagggtgtgaaggcgactgctaattacgatgttaaagaagatgcgaaaactgtctactatcggacagcacaacttgaaaagtcaccaatcatggccattcagtttggtaatgggaatggtgtcgcccgcgcaaaaggggttaaaccggtgaaactcagtgagattcaaaacggcgattcttcatccttgcgcgcaattcaagtgccaagtcaatctagtaaggacgttaaagtcgtctctgacgctgaatttaatcaagtggcaggcgcaaccacgcaagttaaaacatatcgggtcaaagactttgcggttaatttacccgttatcaaaaaaattcacgcacaacaagtgattgcaaatcctgaattggctaaaggtcaaggggctacaatggataatagcaagtatgctaactataagctagcgaacagcatgttcagtgggctcgaatttatgggcttcttcctcgggattgcattcttagcgatgttagcaagttgcttgatgttcaagattttatctggggcagctagtgatgttaaacgctacacaatgttggctaaaatcgggacgcgtcgcaatctattgcaacaatccattgccaaagaaattggggtcttattcctcttaccaggcatcgtcggcgtcatccatgtcctctttggtcttcaattgttcaaattgattatgattgatccatataatgatctctggattccattttcaattttcattattctctacgcaatctactacttactcactacatggctctacaaaggaattgtgttgaaggaagttaaatagtagatggttgaaacagtttaaaacataggaatcagtctaaaaaagccccctttaatctgaacttcgagattaaagggggctttttttagatgaggtcgaagttgtttctctagacgctacttgttacactgatgttattaagaggcgtataccacgctggattagtttttaacttgcttagctacaattggggtgagcattttacctacaaaaaaagccaaagaagactgccgaaactgtcatttgaagcgcgcgttattattgaacgacatgaattattgcccgcgaaaaaagctgaacaatcagaataatattgcccagctctatattcaatgaatattcatacatcaattatcgttttgatactattgaagggttaattgattgtaactttcaacagtaacgccttcgtctgttaaaataactttagtaatactaccgttcattggactaacggtaacatcgaattggtcgttaccaaacttgccaacaatactgcgaatggttgtgccatgactgaccatcaagactttatcaccgtcagaacattcagcacgaagttgtttgaaacctttaccgacgcgggcccaatattcagcggcatcttcagcatcgtggaagggatcagcttctctcatgaaatctttagaggcatcgagtgagtatttggtgatgatttcttggaaggttttggcatcatgactggcacctgccatgtaccacgctttgggtgaatcttcaccttcaaaatagccgtagaattcttcgcggaagtgcggtgtgatagcatatggagtatcaaggtagaaattcttatggagaataattttagcggtgtccattgcgcgactgcggtcactagaataagcttgagcaaaattaactttcgctaattctttgccagcgcgttcggcatctgcaatccctttcggagtaagtggtgagtctgaccaaccttgcatccggttataacggttaaagaatgtttgaccgtgacgcactaaataaagtgtgattcgtttcatatcgtaaccctccaacaatagcttttagtaccttcattctagcatagataaaaatggtgtgcagggtcattccatattttttgcaaaacggttatatacatttataatttttaatggtaataataacaattgatttataatcaattgcaattatcattaagagagaataaattttaaaagatactaataaataactttatcaatatttattaatattttaagcataaatcttttaattttatacattttgtgttatttttgactagtaacacttaataaccacatttagtgtttatgtaaaggagtggttcgatgcaaccagaaacggatagtaaccttgttgatcgattcaacgaatggtatctgcaaattggccaaatttacaataagataaatcatttaactgtcacgcacgacttgacatacgatcaatttttgattctcagagaggtcaaattaaaccccaatattgaagtggcgaaattatcggaatcctttgatctttcaggcccagcaatttcacgtaaaattaatgttttattcagaaaacacttaattgttaaaaatcgcagtgatgaaatggaccaacgtaaagtattcatttcattgaatgagcaaggattacgaatggttgatcaattggaagtcgatttctacttattctttaaacattttaaagatgacggcaatgcagacctttctcaattattcgcacaaacaaaccacttattcgatacaatggataaatgggaacctaattcagatattattgattaggtcaaaaaaagccgcgcacaaatttaaatttgtgcgcggctttttttatttaatcgttaaagttgccattttctacgtctttgatgaaagtcttcaagtgatcgaagtaaacgggtgcgttatcaatcatgtgatggtgaccaccatttggcgttgtcactaagcgagcatggggaatcttttcagccatgatcttagcggttgcgattggcatggtttcgtgttcaccaaatgtgattaacgttgggacagtaatcttgtggagttggtcacggaaatgccaatcctttaatttcccagtcacaacgaattcattatcaccttggaagacgccataaacgtcggttgccattgttgggattaaatgtgagattgcaagtggttgtttgcgatcaacgtaaccagcgtttaacttgtcaacaagtgcttggtattcatcgttgtcgtaatcattcttagcttcacagtcttgcatgaatttcaattgttcaggggtcatgatgtcttcacgaattttgttgatgtttgtgacatattcgtcaatttcatcgaccatactcgagatgatggcaccttttaagtgttggccatatttagcagcgtacatttggaccaatgcgccaccccatgattggccgattaagtagaagttgtcgatgcccagtttttgacggacttcttcaacttcatctaagaagtaatcatatgttaataattggtcattgcctggttgtgagtaatcaggttgatcagaataaaatgaaccaagttggtcgtacatgtgtacttgtacaccaagatcagctaattccttaccgaagttttcccagtattcgtgattaccaccagggccaccgtgtaagcagagtaaatgaatgtcgcctgttccttgcgtattagtccataaatggtaaccattatccaatgtgaggattgttgttccttgtttcatatctgcaccatcctttaattatgatagtttcattataaacctattagagagaatgtgcgagggtcaacatgatttagttgagcgtttctaattggcgtcgaatggcaggaacagcctgtttattccccgttagaatgaggtgatcattgagatggatttgcgtgtcaccatgcggcatgatcagttgcttatcgcggtaaattcgactaattgtgacttggtccacaaatgggagattagaaagttgaatcccggtgaagcgccgatttttaaccgtgacttcgaagagcccggcatcagtgttatcaatgatttgtaaggtagatggagtctcgattaaacttcgcaacagactgatatttgcttcgtaagtgttaaaaatttcaacgccatgttctttaagttcatcgtattgatcgtccgagatattcttaaattcaaagcgggcgatgatccgcggtactttggcctgaatcgcttgttgggcaagttgataattttgctcattatttaaatagcctaagaccaggatatctgtatcgaagacggccgcgtcagttaaggtggctggtgccaagtcaggcaagagttcgaggttggcttggctatggtagatttgataattttgttcgttattggtaaataattcgcttgtgtacagacctttggataactgttgggcgattggaattgtcatgatgttggcgccgatgaagttaacacgtttgcgtggcatctcttcaggcgttggtaagtagaatcgattgaacagaatcggaccaagaatacagctaatcaccgctgcaattgtgaaagcgccggattgctgtgtcgtgataaccttcaagttgagaccgaccgtcaaaatgggtaagaccaacgtgatggtcgtcgaactgaggaaagtcccggcgagggcgttggtgactttgaagcgccgttttaagacgaagtaaatcaaaactttggcgcccatgaaactgatgaagaaaaagggaatcagggtcagtgatttaggatcacgtaagagcgcggggatgttgagttttgcaccggtcataatgaagaagatgggaatgaaaaagccgtagccgattgatgttaatttatcttgcgtctcttcacgggggcgtaaaagtttcatgaccatgccggctaagaaagcgcccaaaatactttcggcaccgacttcttcggcaatcgatacaagtgtgatgattaagaaaaaggctaaacgaatatcgagttgagtcgttgacttatcaatccgctcaaagaagtgataaacagttttaaaacgcatcaataagaagatcgcggctaagaaaattagtgatagtaaccacagactcttagaaccaggattattgagggcggcataaattgttaacgaaatcagcgggacgatttccccgaggacggcaattaacagaattgtttggccaagcggctggctgaggagttctttttctttcaacgcggcgatgacgacccctaacgcgatggttgaaaagagaattgttgcgagtccaatatcggtgaacaacccactccatgccaataaactggcgagtcctagcgaacttaataggatcagcgtaaaactaccgactgccagttgtaagggcgtcagcggtgttttaacgccagatttagctgtggtgggttgctttttaaagagttcaaagtcgatttccatcccgcttaagaaaattaagacggtcacacccaatgatgaaagttccgtcagtgtgggggtggttgagatgaggtggaagccactttgtccgagtaaaatcccgaccaaaatttccgcaacggcggttggtaaataagaaatcttaaattttgccatgagtaacggcgtcattaaagccgccaatagaacgattacgagcgctaagcttgtcataaaaaagatcctttcaatgcacaataaagttgtgtagagcatacactaacctactaaagcatgtcaaagccgaatagcttccgagcaacagtacgggttcgtaaataggcggtgtagccgactgtttgcgggccacagctgtgcacaggaagttggctttgatagctagatgggtactaaagcatgtcaaagccaaatagcttccgagcaacagcacgggttcgtaaaattggctttttatatattggcgctaatattatcgattttgttgataattcgttagtgattaaattattattaaaaagttggcattatcgctagttaatatctacaactaatttacaattggtaataacttctgtaaaatagatgctacgatattaaaaagggggcgatctaaaatgaagataaaagaaagtctcgcggttggaatttttgccttttttggcgggattttacgctatgcaattgggctcggattgcaccaagcagcagggtttccgtatggcactttgtgtgtgaatttaatcggggcgttttgtcttccttttttaatgcgttacatcgtggttcgttatcagatcagcgatacgctggcacttgcaatgggcacgggctttttcggcgccttcacgactttttctagttttagcgtggatgcattgaagttattggtggccaatcaatggtggccatttagcctgtatatcgggattagtttgattggcggtgtctgcttaagtttagtggcagattactgggcagtttggctgctcgatcggcaaggaaagtcgcaggtgctaaaatgatgacgttattaattgtcggattgggcgcggcaatcggcgctattttgcggtatcaattaacccgtcttggaacgcagattgccagcgaatatccattaatcacctttttaattaatttaacggggagcttttgcttaggctgggtgaccggggcacaattggatcaaacgtggacgctctttttgggcgtcggggtcttgggtggctacacgactttctcaacgttcaatagcgaattgagtcagctgtggttccgccgccgttaccatattttctttggttatctgctattaacctacgggttagggctagtggttgcagcggccggcttttttgtgggaagatcgtgaaacgtgctttagcaaataactttttccgcttagctacatcaggaaaacaatcgactacatcgcttatttccctgattaggctaatcctcgaaagttaaaccgtttcaaacgcactctaaacgtgctccgataggcatatttctacgcttaaccaaatttaccgaaccgacgattgcatcgccaattcggtaaatccagttaatgctcaaaatataagcgcctatcgtcgcactcttgtgaatttagtgttaaacttgtagaactgtttatttagaaatcgggggacatctgctttgactgacgaacaaaaatcattagaacaacgccgtttaaccgagattgtcggtttaattaaaaacgccgaaaagcacttcgaaggcgccgttgaacgggctaaatcagaagaaaaagaaattaacgcaaacttctttaatgatgtacggttgaatttcaataatgattcagcaatgactgaaacggcagtctcaatcgaacaacaacggcaaatgttgcaagaacggaataattcttggcaacaatcttcccggcaacttgagactttacaaaaaatggaaaaaaccccttatttcgcgcggattgattttaaagaaaagggtgaaccaaagtctgagtccatttatattgggctagggtcattcaccgatcgcgaagatcatttcttgatttatgactggcgggcacctatttcatcaatttactatgaagggaagactggtgaagttacgtaccaaacgcctgacggcccgcaagacgtcaatatttctttgaaacgtcaattcttaattgaagatggccaaattaaggcgttatttgatacgcaagaaacaattggtgaccaaatgttactggaagtattgggcgaaaagtctgatacacaaatgaagagtatcgtgacgaccattcaacgggaacaaaatcaaatcatccggaacactgacgcggacttattgttcgtgcaaggggccgctggttctgggaaaacatccgcgattttacaacggattgccttcctactttaccggtatcggggtaacctggattccagtcaagtgatcatgttctcgccgaaccaattgttcaacgattatatcgctgacgtgttgcctgaacttggcgaacaaaacatgattcaaatgacttactatcaatatgttgcacggcgtttgccgaaccttgctgttcagagtttatttgaccaatttgaaaccccaatcacggaaactgatgcgcggattagccgtttgaaagaaagcctagtcttctataaagcagttaaacgttacgcagcgcatcttgaaaagggcgatatgcgcttccgtgatttgaaagtgaacgggaaggtcttgattagtaaggaaaaaatcagcgacgtctattaccgtttcaacgaaaactatcatttaggaaaccggctagatgcgacgaaggaaagtttattgcgcagtttgagccataaagtcgaccacgaaaccaaggcggactgggtgacagaacgcgctgaaaacttgagtgatgaggaactccgcgaaattatggcgggtaaggactttaagactggtgaagcggaaagtaaatatatcgctaaacaaatcgttttgaaggctttcaaacccgttcaaaaaggaattcaacgcaatcgcttcttgagtattcaagcacaatacgtccacttcatgcgggttgtgccgcaattggttgatttggctgaatttgacctgacaccagaaatctggaatgatcatgtgactgattttgtcgctaatttaaaggccaaacaaatgacgttatcagatgtgacaccttacttgcatctttatgatttaatgaccggtaagcacggcgaacgcgacatgcgctttgtctttatcgatgaaatccaagattacacaccatacgaactggccttcttgaagatgcacttccctaaggcgcgcttcacgttactcggtgatttgaaccaagcgattttcaccaaagaaaacagcacgaacctattacaacaagtgcaacaactctttgatgcgcaaaatacgaaggtcgttcaattgacgcgttcataccggtcaactgaacaagtcaccgactttaccaagggcctcttaaagggcggtcaaaaaattgaagccttcaaccgtgaaggcgacaagccaaacttgatcgtgcgtcaaagcgaagatcaattggtcgctgatgtgaatgcgcaactcgctaaaaatgaagcagataagttaacgacggcgattatcaccaagacattggtgcaagcccaagaattaaccgctaagttgaaagccagtggtacaaaagtaactttaattcgttccgaaaatcaacgtttggcagcgggcacgttagtcgttccaagtttcttagccaaagggttggaattcgatgcgattatcggctggcaagtcagcgcaaccaactacaatcatgaagatcaacggcaattgctctacacgatctgttcaagagcgatgcatcgcctcactttattagcaacaggtggcatgtcaccattgattgataatgtggatgcggatgattacacgttaattaaatagaaaaaacgcgcgctgaaaggcgggcgttttttgattggatgaaaagtgtaatcgcgagaaaatagacaatgaatattttaataaagcgcttttaattattaaaatgtttatttataaatttaatggattttaaagcgggctaataattatttagcccgcttttttgcatcttatcgctttcttagcttatggattacttattaattgccaaacaaaatattgtacattgaccgattctattcgttaaagtttatatataaataatgtccattattacattatttatattatacttacttataattcgatcgtcccccttagactgatgctggaatggcaattatcgatactaaagtatttttatgaggagtatatgatgcaaagattaaagtatttttacaggcgacatgccttaacagtaaccctattattttttggactattaagtattgcgatggttgcaatcgtctatttacagcccaataaaatcctgtctggttctgactatcatttccacatgaaccgcattgagaatttggcactttcgattaaacagggagagtggtttccgagaatcagttactttttcatcggcggaatgggctatgcggcaggtcttttttacccagatgcttttctctacttaccagctattctgagagtagtaggactatcaatcaaagagagttttattgtatttgcaattgcgattaattttagtacgtttttaatcacatatatttcaggaaaattagcggattttaataagaagcaagcattaatattctctttgatgtacggtcttagtatttatcgttttgcagatttagttaatcggcaagccattggtgaggtgatcgcgctcacctttttcccattaatgattgtgatgctaacgcggttaaaaaaaggtgagcaccggtattggtatctgttatcaatagggatggcagctattggttatagtcatatgatttctgttgaaatgatgggcattgtcatcattatttataccttattaaatctcaagagattctaccaaaataaaagtttaaagtatctcattgctgctggcttattagcaatcggtttattagggcgttatttcttagcggttggagaacaaatggcaaccacgatttttcaagtaaccgcacaacccctggcatttttgtctgaccgcacattaccctttaaagacattgttgttaattcattaacgaatgctgtttttcatgcgaatacagtgaatgtcggtatcacgattctactcggattaggcatcgcgtgtggtctattttactattccaaaaacgaccgtgatttaattgggattgcgttgggactattcatagctacgacgtcgattatgccgtggcatttgttggatcatacaattatcaatacgattcagttcccgtggcgtttttttgccattattacggcaattgtgagttacttagttgctaaggatgaatgccatttattaaagaataagtactacttttatctgctaattctgttgttgggcgcaggaaatgtcatctactctacgaatagtattcaaaaccaaagttggcgctttagaaccaatgctgcctataacacgcccaacccttattacattggggccggacatgagtatttacctgctcaaaccgactaccagaaaattttgcgacataaaaaacaggtcgttaagtatcagccgcataaaataaaaattacaaatgtacggcatacatggggccgttatcagtttgatttcagggcactgacggatcaaaaagcagttgttgaagtcccctttatttattacaaagggtacgttgccgaactcaaccatcatcagcgattaccaatgcagatgaataaacgaactgggttaacacaagttgcgttgaagggaactggtagaatcaccgtttattatcgaacaactacgattcagagaatagggacggtggttagtttgcttagctttgggatgctgattataatcatttataaagaaaaaaggcgagctactaaatagcgcttattcacggtactagactaatcctcgaaatataatcgcaagatgacgcactctgtttttaatgttaaaatggatgcgtttagtattggaggattgtcggatgaagaacgagatgaaatattatgaaatctcgcgtgatgagtggcgggtttttcatggccgcggtgacgcgtatactggcatcacggacacggagctggaacagattcggggattgaatgatcggatttcacttgcggatgtgagtgatatttatttgccattacggcatctgatacagatgcactatgaacagtaccagatgcgccaggccgaaaaatctgaatttctagagattaagccacataggacaccatttgtcattggcatcgctgggagcgtcgcggtcggcaagagtacgacggcgcgcttgttgcaactccttctcagccgggcctacccggataagaaggttcaaatgattacgactgatgggttcttatatccgacagccacgctgaaacaaaaaggaattcttgataaaaaaggctttcccgaaagttatgatatgccgcatctaattcaatttatgaatgcggtcaaaaataatgttggaccagtcaaagcaccgaaatattcacatcagatttacgacattgtgcccgacgagttcgacgtgattgacgatccagatattttaattgttgaaggaattaacgtactacagttgccatcaactgagcagatttacgtcagtgacttcttcgacttttcaatttatgtcgatgcgcaagccgacttaatcaagaagtggttccttgaacgtttcgatctattactcgatttagccaaagatgatccgaccaactactattatccatacgccatcagtgaccgacagagtgcattccagatggcgcggcgggtatggcgtgacattaatttacaaaatttaaacgaatatatcttaccaacgcgtaatcgtgccgatgtcattttgcataaaacgaaacatcacgtgattgataaggtattcctacgtaaatattaataatagaatgagttttttcacaggaaggccgtcaatccattgacgttttcattattaatcagtaaaatagatacattatagtttgacttagtgttatgaatctagcaatttggtgttacttgttcacaccaaattgctttttaaaaagaggagtgagttgtttggtccaaaaggacatgcaagatttcgataagattatcgtattagattacggtagtcagtataatcaattgattacacgtcgtatccgtgaattcgggattttctctgaattgttgcctaacacgacaacagcagcagaaatcaagaagatcgcccctaagggaattattttctctggcggcccaatgagtgtttacgatgatggtgccttttcagttgaccccgaaatttttgaactagggattccaattctcgggatttgttacgggatgcagttgatcagttttaaaaacggcgggaatgttgaagcatcaacagaacgtgaatatggtaaggctgaaattacagtcactgacaaagacagtgacttattcaaaggtcttcctgaaaaacaaacggtgtggatgagtcatggcgacaaagtcacagcgattccagaaggtttcgtaacggttgctgaaagtgataatacacctttcaccgccatcgaaaaccgtgaacgtcggatttatgggattcaattccataccgaagtgcggaatactgaattcgggaacgatattttgaagaactttgcatttggcgtctgtggggcccaagacaactggacaatgaacgatttcatcgacatgcaaatcgaaaagattcgcgaacaagtcggtgacaagaaagtccttcttggtctttcaggtggcgttgattcatctgttgttggggtgttattacaccgcgcaattggcgaccaattggtcagcatctttgttgatcacggcttactcagaaaaggcgaagttgaacaagtgatggaaagtcttggcggtaaatttgggttgaacatcatccaagtggacgctaaagaccgtttcatgagtaaactcgctggcgtttctgatccagaaaagaaacggaagattattggtaacgaatttatccaagtgttcgacgaagaagcaactaagttaaacggaattgatttcttagcgcaagggactttatacactgacattatcgaaagtggtacaagtactgcgacaaccatcaaatcacatcataacgttggtggtttaccagaagacatgcaatttagcttaattgaacctttaaatacattatttaaagatgaagtccgtgaccttggtgaaaaactaggcatgccatatgaactcgtatggcgccaaccattcccaggccctggccttgggattcgggtcctcggtgaagtcactgaagacaaattaaagattgtccgtgatagtgatttaattctccgtgaagaatttgcactcgctggcttggataaaactgtatggcaatactttacagttttaccaggcatccgtagtgtgggtgtcatgggtgatggccggacatatgattacacagttgggattcgtgccgttaactcaatcgacggcatgacagctgacttctcacggattccatgggatatcttgcaaaaggtttctgtgcgaatcgttaacgaagtcgatcacgtcaaccgcatcgtgtacgatattacgagcaagccaccttcaacagtggagtgggaataaaatcctaatcaaaacaccgcaagtcgtttcgacgacttacggtgttttttttgtgcaatcaatttaggcttttaacggtacttctttgaaatcagacgcaatataaggtaccgtctaatcaatgaaagtagggatgattgatgacaaatgggcaacaattagcgactagtgaaaaaattaaacaagggattgtctttgcggtggcgaagttaattcaaattctccctttaattggcttaaccatgattcatagcgggcagtcagtggcgtcttatatgccgtatatcttattctataccgcgttgaaaactggcttattattcgtgagtagtctaggccacgtgcagaattcatttaaaataactagtatcagtatgctgctagctgctggtgccttattgttattggccatttcgccgtggttgtatctaaccgatatggcggcttttatcttgggggccagcgccagtgtaatcatgccgacctatgagggcgtttattatcacgagcgagtggtttggaaatggcaccttatgggcactgaaattaaaacgttattggcttttagcctaataacggttggtctgttgaccatcgctagtcatttttcatatcggttagtctttattgttatcatgctatttgtattgattggtttcattggcatgcaacgcttcgaaccgtttgtgaagcaacttgatgaatcggtgttcgtcgaacaaaccaaatcgcttaataacttggaactatttgtctgggcaaccgcgatggcgtttgcgctaagatatctgcgcctttttgaagctaaatttgtctggttattaatcacagtcgctgtcattgggttagtcgcgctaatcttgcgggtgatcatcacgcgcggcactaaaacgaagatgccgggttggcttttggttgcggctttaattaacggggcgtttgaaacgttcttaatgctctatatttttgtcgcaattcaaaatcagagtttgatgataggcacctacgtgacttacggtgcggggatgattttagcccaagttattcgaaagagcgtgcaagggcgcttttcgaagttatcagacttaaaagtccaattactaggatttgttgttggtgcgtggttgatgattacgccacatctaattttattaggcatcttattgattagtttctttggcagtgccaacagcattcttttaaatcaccgcgcttattacaccggcgtcacgacgccggcccaaaccttaattattaaatatcggaatacgtatctcggtagtatcctaatgcaatttatcttgatcaccggcttgatgggcctagccgtaatgcggcaacaagacataacggccgtgattgcccaaatcagtggcagcgtcgcaatgtctgacacaaccagtcagttgattcacttggccggcctgattagcgttggcttgctaacggtaattgccggattggctggcagatacttgccggcggtggatgaaaatccgctgatttaaaagtaaaaaaataacggtccctaaatggggccgttatttttgtggtttttgaggattatgttattacttatatggatcttttttggggatgaaaagtgtaaaatgagtagagaggtgccttctagtggttcaatagttaattaaacgaatatgaatgatctaaaagtatgtccggattctaaaggactgcttaaaaatcaacattcttggttatgaggattgagagatatgttaaagagtaagtaactataaaattcattgtaattatgaactatttaaaagatactacacaatgtagttttggtaaaataaaaaatatagattaggaaattgtaggctttaacatagagtgaggtcattttttaagtgaaaaacatttcatacggtagattgtaaaattaatccgaacgctgttcggacaaaaaagatcagcttcctttaaaattaggctatactcagaagttaaccgccacaaacgcactttattttaatactaatttagtgacactttcgacgtgtagcgtttgtgggaacatgtcgactggttgtgtgctttctgcttggtagccttgggctgccaatagttctaaatcacgcgccaacgttgctggattacagctgacatagaccatcttggctggttttaattgaccaacggcttcgatgaagctagcttccaaccctttacgtggtgggtcaacaatcaaagcatcgacttttaagtcatctgcttgccattgcgccatcacttcttcggctttaccgagtgtaaattcaacgttttcgatgccgttaatcttggcattgtgccgcgcatccataacagctgattcaacaacttcaacaccgtaaacttgcttagcatgtttagcgactgctaatgaaatcgtcccaatccctgaataagcatcaatgactgtttcgttccccgttaattcagcagcttcgattgccttgttatacaagacttccgtttgcactgggttcacttggtagaatgattgcgctgaaatttcgaacttcaagcccattaattcatcacgaataaagtcgcggccagcgattaattttgtttcgtcaccaaagatgacgttcgtttgagcagcattgacgttttgcatgatgctgaccacttctggtaaagcttttttgatttcaacggcgatttcacgggcagccggtaatttcttactccgcgtgatgaagacaatcatcatttcgtggctgtaataaccgcggcgaaccataatggtcttcaaaacacccttatgcgtatcttcgttgtatggatcaatgtagaaacgacgcaagatatcacgaatgaccttgatagcttcatcaatcttaggatcttgaatgtagaagtcttccattggcatcacttgatgactgtgtttccggtagaaaccagttgttaaagcaccatcgataaaccgaacaggaacttgcgccttgttccggtaacccgttggatcatccatccctaaaacaggttgcactggaatatctaaatgggctttttggaagacgttcaagacttggttacgcttgaaatctaattgggctgggtatgccaagtgttgtaatggcgcaatcccagtttgtgagtaaatgttagcttttgattcaacgcggtctgggcttttcttcaataaattaactaagcgcgcaaaaccatattgtttattgacctttgtgacttggatttctgcttgttcatcgggcaaaacgccttcgataaacaacggatagttgtcgactttagcgacccccatgccttcataggttaaatccataatatcaaccgtcaatgtttcattttttcttacaggtgcttgtattttcatagttacctctttttaattgtgtaaaaagagtctgagacaaaactgagttttgcttcggactcttttcttagctacaagtgtgcggtcaatccgcccacgttatccaatgttccagtttaacctattttaccatcgccgtctatgtcttcttcagaaattgcttcgacttcctttacgaataaatcttcggcagactgctgagtaggggtttctgatgtaatagcgtgatctggaatatcttccttattcacatacatctcgatatgttgttgcaagttagtaaaggtcattggtgcatcgccaccgtattcgccatctaaattaatcatcatcttaacgtcatcatcactaggccgcgcaactagttttgacgtcttggtataaatgacccgtggatcattaacgtgtttgccacctttaatgacgagtgcgattaaatggactaattcggccatgttggctgtcttaaccacaatcaatgagaaattaccatcattcagttgtgcatccggcgcaatctgttcaaatccaccaactgaattggttaaaccgagtaagaatagggaagcttccccatcatacgtaccttcatcatattccagatgcatcttaatcggtttaatttggggtaacatctcagcaccttttacgacatacgcgagatagccaaaaattgacttaaagtctgaggggacttcataggtcaattcggttagcaaaccaccaccagcaatgttcatgaagtaattgtcattggcttgaccgatatccatcttaagcgtttggttcttcaaaatcacgcgggctgcttcaaccggattatcacgcggaatcttcaaagcccgagcataatcgtttgttgtcccagccggaatgacggccatcattgggcgtttttccaagccggcaatgccgttgacgacttcattaattgtcccatcaccgccagcggcaacgattaaatcgaagtccgcctttgctgctcttgtggcctctttttgcgctgaagcttcttcaggcgttgtttgaaaagcactcgcttcataacccgcttgttctaaaatatccagaatatcagcgacactacgtttcatcacttcatgtcctgaagttggattataaattaaccgtgcacgtttttgcattcgaatctcctaaaatatcaattatcgtttgttcaattcggccatcaacaagtcattgacaactttcggattagcttgaccccgtgtttccttcataatcttaccgactaagaacccaactgcgcggtctttaccgttcttgaaatcgtcaattgattgttggttgtcatctaaaatacctgtgatgattggtgtcaacttagcagggtctgataattggaccatgcctttagcttcaacccaggcttttggatccgtgtcattttggataatttcttggaagactttcttagcaatcttcgatgaaataatcccgtctttaatcaaattgatcatttgggctaagtgggcaggtgtgagggctgtctcttgaaggtcaatttgtttgtcgttcaagtaagcattcacttcacccatcaaccagttagaaacttgttttggtgcggcgccatcagcaacagctgcttcaaagaagtcagacatttccttggtgttcgtcaagacacccgcatcgtattcaggcaagcccaattcatccacatagcgtgcacgccgtttagccggcatttcaggcatattgtcttgaacttcttgtaaccaatcatcaccaatgtgtaatggtggtagatctggttctgggaaataacgatagtcatccgcaccggtcttaacccgcataaggaatgtttcgcccgttttttcgtcaaaacgacgggtttcagggcgcactgtttcgccagcaatcaaaagttgtgattgacgcttgatttcataagctaaccccaaacggacgtgattaaaggagttcaagttcttcaattctgatttcacaccatattgcttcgcaccgattggtcgcacagaaatgttagtatctacccgcattgaaccttcttccatcttaacgtcagatgcgccagtaaattgaacaatttggcgtaacgtttcaaggtaagcataggcttcttcaggcgttgacatatcaggttttgaaacaatttcaatcaaggcagtcccttgacggtttaaatcgacatatgaatagccgtcagagccatgggtattcttcccggcatcttcttcaacgtgcaattcggcaatcccgatttgctttgtatggccatcgacttcgacttcgatatagccatctttaccaaggggttgttcgtattgtgtgatttggtaagcttttggattatctggatagaagtaattcttccggtcgaaatgcgtatcgcgcgcaatatcagcgtgcaaggcagtcgcaaccatcatcccaagtgtgtatgcccctttattcaaggttggcaatgtcccaggataaccccagtcaatcacattcgtgttagtattcggttctgcaccatagtttacaggagatggactgtacatttttgaattggtttttaattcaatatgcacttcaagtccgattgttgtttcgaaattcattaggcttttcctcctttgaagcttggaacgttcttgttaaattgagttgcttgttcaaaggcataacctgcgcgataaacagattcttcatcaaatgctttcccaataatttgtaaaccaactggcatgccatctactaagccggcaggcactgacattgctggtaagccagccatgttagcaggaattgttaagatatcgttcatatacattgtcactggatctgatactttgcgacccaagtcaaaagcggtggttggtgttgttggtccaaccactaagtcgtagtctgcgaaaactttttcaaagtcgcgcacgattaatgtccgcacttgaccagccttcttgaagtaagcatcgtaaaagcctgatgaaagggcaaacgtccctaacataatccgccgtttcacttcatcaccgaaaccttcagaacgtgatttaacatacacatcttcaagtgtcttggcttcaggtgaacgataaccataacgaatcccgtcaaaacgtgacaagttagatgaagcttcacttgaagccataatgtagtaagtttggacggcatacttagaatttggcaagctgacttcgtcaacggttgcccctaatgatttcaaagtttcaatggctgtttcgatttgggctttaacgcctggttcgacaccttctgccatgtattctttggcaacagcaatcttcatacctttgatgtcaccatttaaagcggcacggaaatcaggcactgggatatcagcactcgtactatctttttcatcatgaccactgatggcttgtaaaacagtcgcattatcagcaactgtccgactaaagaccccaacttgatcaagacttgaagcaaaagcgatcgcaccccagcgtgacacacgaccgtatgttggtttgatgccgacaatcccattaaatgcagctggttggcgaattgagccacccgtatctgtccctaaagaagcaacgacttcaccggccgcaactgctgctgcagaaccacctgatgaaccaccaggtactttgtctaagttccaagggttctttgtcttcttgaaggctgatgtttctgttgatgaacccattgcgaattcatccatgttgtttttaccgatcacaattgcatctttagcttttaatttttcaacaaccgttgcatcaaaaaccggcgtgaaattttcaagcatcttgctggcagcagtagttgttaagccatctgttaataagttatctttaatcccaattggcatcccagctaataagttatctgcatcaattggttgggcgtccactttggcagccgcagcttgtgcaccagcttcatcgattgctaaaaaagcatcaacttgtggttctctcttgtcaatttcagcaactgtttcagttaccaattggctagcagttaagtcaccagccactaatttggcatggatactttgtaaatcttcatataagtagttcacggctagtcttcctccttatccataatggcagggactttcaataagccgtccgctgaatctggtgcattcttcattaaaatctcgcgatctgtgccagcttgagccacatcttcgcggacaatattttgaaggttattcacgtgggtcgtcactgggacacccgttgtatcaactttatttaattcatcagtcattttcatgatgtctgcaagttgttcagtaaattgttctaactcagcatcgctaaaagctagttttgaaagttctgcgacatgctgaacttgtgttttatcaatcatgagtaaacccctcttctaattctgtcacttttatccattctgattaattttaccatatattaacgtataagaaagtgacatcccttggaatttaccagtttttcctaatctttaccggtttcagcagatattgaaatatatttttactttctttttaaaagcgtaattgaatgttatgcaattcattagaaggcgatatgatttataagagtttatcatagataagaattcgtttaatcttatatactgagtacagataagaagttgtgaataatgtacaagattatcattaacttatagatgagtgttataatatgaaaatcaatatctcggaacaccttgtagcagtagtagttttaagtttaatgggtggcattgtcttacaaagtacgaccgtttcagcagcgaccacttcggttggtgtaactatcactggtgtaacacctggaatggccgctaaagccaaagaagcagccgcagaacaagccgctttagaagaagcatggttacaaacagaaatcgatgacagcgaacctgtagaagttaccgaaacaattggcggtcaaacaactcactactgggaatcagcagatggctcacgaagcacaactgcccccgcagaagttcaagacgaaacagtagccgcaccggaagtagcacctgaacaatttgaagaaacagcagttgaagaagaccaaccagccgaaaacttcaaaccaatgcctaagaaacatgacatcgatcaaaaagcaattgctttcaaacaactcacaacagattgggctagcaatcaaatcatgtcatcattggaagacttaatcactaaggctttccaacttaacaaataacactcagtattagctaagcggcaagtatcgtaaccaagcgtccccagttttgagtagtttcaaaagcaacactcaatagtctgtcggtgtaacttacggatttacccatactagaagttactaaactatttagaattgtttttttcctattttaaacgtttataaccactccactgctaaaataatttcattaaagtttgatgagttcacccaaaattttgggtgaatttttttattgcttaatgatttttcaaaaataagtctaattttaatagacatttcacaacttatttcatgctcataaaagaacccaaacctactgatagaagcaacttaattaattatcgggctgtattatcggtatccagtctgaactcccttcatgtaattttcatttacggcagactctggctagcctgatcacagcagaacacctcaataggtgttatactcttaataacatctttttaaaaggagtctatcatgaaaaaatcagtccgtttaagcaatgccgtccacctgatgaccctgattgctttaaacccgtttgataacctttctagtcagcgcattgctaaaagcatcaatactaacccctcttttattcgccaaatcatgggacaacttaagacagctggcctattgacgagcgttaagggccatgccgaacccaaactaacgaaagctcctgaccaaatttcgctctgtgatatctataaagccgtcgatgatacccggttattgaacatcgatacccaaattgatcctagttgcggccccggacaaaatattcaattatcgcttgctacctattacgatcaaatccaagaaactgctgaacagcaaatgcaagccatcaaactagccgacattatcgaacaatatcagcaacgtctcactgaaaatccagaattaaaactttacgaaaactaacacacaaaaaggttgggcaaattgcccaacctttttgtgtgttaatcctcagcggatacccggctgatgccgcactcttttcttttaaacgtgctctatcagccaaccgcttccggttaaccctgaatggcaaacaatcgctaacccggttattcaccattctgtgttaatcctcagcggatatccggctgatgccgcactcttttagatttgctagtacctttactaagtcatacttaactgcaataccgcggtccgttaattcacgtggcacaatcgcatctttgggattaacggtgatatatgttgcttgtggattttggtacgttagattcataaacggttccttaataaacatcggtgtcatcatacccacacctagttctaaatagaccgtttttttaccttcagctttttgaataaattgacgatactttgcgtattgattgttgtagtgctgaccttcaagaaattcataaccacggacccattccaacatttcagcaccacatttaaggcactgcggaattaagttttcgggtaaatggccattttcaatttgcggaaataattgatcaacaactgtctgattaggatagacttaatcatgacatttatcggcacattgaaaataggaccagtcaccctgaatcgtggcgacatctttatctggaaaagctttcgagaattgcacgtcttgattcgtcgttatcaaatcatagtctctatcctttaaaatggctttcaagtcctgatacggttggtaaactggttcatgtaaaacaaaatgaattaaagacagcttaaagccccataaatcgccgggattataccaatcgggaccagccgcagccgacatgccggctgcggctcccacgatgacgtaatctgcctctttgagcgtcgttgccattttttgtagtgttgcttgatagtctaaattagtcatttttgaggagctccttaaaatgatcatcgattgatccagcaagaccgattgaccgttgttcaatggctgcgggaatattgatttcgtgcggtaaattcaacgtgatgtaacggtaacttagactttgcgccaccaattgcatgaggagcgccttaattaactgattattagcaccaattcctaattccagaatcaccacgttttgtgaacggtacttttgaacaaatgcgttaaacttagcttgttgcttttgaatcatcggcattggattttgattgttaccaaaattaccttccacttcaaaaatccgttcttcgtcaaatccactcagttgaaaatgcatgttgccatttgatgtgacaacaaagtattcatgatcgcccaccaactactttaaatcgcgaaagacaggtgtactttcatagtgatcaaccatataatcgaacaatactttgtaaaatgcatctctttcagccactgttggatagttgtaaaaagccccttgaagaatattcataatcccgtagcgttcataaaaagtcccaaagtgggtcataaacgcttcgtcgtgtgcaaaaatattgtaaccttccgtaattgatagcccgttaccagcactaataatgacggcatccgcattgtctagccaattccgtgctgttttaaactcgttcatgatgctctcctttggtgtaataaataaaataacaacaatatcgcatattgtacactgttatttttaaaattacaaccactgacttttaaaggtccaaaaaaatagcgtcgacaactgcgttagttgtcgacgctatttttttgcctatcagtcataactgactgttgtcgcactctttaattaataactcccgaatacgtgggttgagaaccttttactgccggctgctcggcctacgtaagcttgcatcccctctgcagacgagattgaaatatctaatggaatattttgtggtaaatatttatcagcagcggttgcaatgtattgtgtgaaactcatgatttctgtttcactgtagaattgtgtattaacggtgatgttcatcccagccaatacaccatcttcatagtgtgcttgagccgtgacaccactcaagttcgggaagaaggtttggacttgttctttaaaactagtaaacgcgtccgcatcactttgattgaccgctttttcatcattaacgagtgggaaaacttggttggcttggttcattttgtgccatgaatcaatcgttgtactaccgtttttgctgaccccataagcgaagaaggttccgcccactaaactatccttaggtgcttgtttgtaaagccccaccacgatggttgtcttactcaaaccttttttctgccgtaaacgcgttaagaccttattggccatttgtttaccttgttgcgccatcatggcactagaaattttggtttcaaaagtagcaccatattgttccttggtatagtaatccacttgattcatcccaagaccaatactcatcccttcaagcgcaccatctgcccctaagaagtcttgttctaagatttgttggagatacagtggattccgcttatccggttctttttcaccattatcttctggatttaagccaagtgtattatcttttgattgacgtgccaaccatttttgcgcttccgccgttttgatggtttgaccttcttggtagaggtatttatcagtagggaattgttttttagaaatgtttaataagccactttccaaactcttcacatcaaatgccgtgttactttgttgtgtggttaatccacgtgtctgacttgtcttgtattggttattatcaataaccccttcatacatgctgtcagtcactttcccggtcgtttgtagctttttagtcgacttagttgatgatgacgaactcgaattgctttgtaaacttgtacaacctgccaacaataaaaccgttgcggctgcaactacccataatttatactttgccactgaaaatggcctccttataagtcctaattgattcgcttattgcgccaaataactgtctaggtctgcttcgttgataattggaatctccaatgcttgcgccttggttaatttactgccggcatcttctccagcaatcaaaatatctgtttttttcgaaactgagccggtcactttagcgccattatcttcaagttgttgtttcaactcaccgcgggtatattgcgatagtttaccggtcaagacaaccgtttttccgttaaagtaactatcactattttcagcttgtgcctttgtcaccccagtataggtcaggttgacttgcacttcagccaattcacgaattaaagtttgtacttgatcatcagcaaaataagtcgctaagctatccgcaatcgtctcgccaatcgtatcaaccgacataatttcttcttgatcactggccatcaaagcctccatcgtcaagaaatgttccgctaataaacgggctgctttggcaccaacatggcgaatccctaatccaaataataacctttctagcgaattctggcgactagcttcaattgcatttaacaaattattaatagatttttctttaaacttatccagttgcgcaagttgatcggccgttaagcggtataaatcggcaacatcatggaccaatccttgatccaataattgggcaataatccgtggacctaagccgtcaatattcatcgcatttctggaagcaaaatgcgttaactgttccttcacttgtgccggacacattgggttaatacaccgcaatgcaacttcttcatccaaatgaaccaattcatgaccacacgaaggacattctgtcggaatcacatacggttgactgtcagccggccgtttagccagtactacttgtgaaatttctggaatgatgtcgcccgctttgtgtaataaaaccgtgtccaacaaacggacatctttatcacgtaacatatcagcgttatgcaatgaggcgcgcgcgactgttgtaccagccaactggacaggatccatcacagcggttggcgtgacaacccctgtccgaccaattgtccattcgatgtcacgaacaatggttgccgcttcttcaggcgggaatttataagcaatctcccaccgtggcactttaaccgtattaccgagttggcgttgtaaagctaagtcgttaacttttaacacaaccccatcgatgccgtattctaagtcatcccgcgttgcttgatagcgctcgataaaggtctttacctctgtcatattatgacaaacttcagcggttggattgacgttaaagccgagttctgcaagcacttcaagcgcttcgtgctgggttgtcgcttgcacatcgtcaaaggtgacaatcgtgtacataaaggcactcaaattccgctcagccgctattttggcatctaattgccgtaaactaccagcagccgcattccgcgggtttgcaaatggcggttggccttctgcttcccgtttttcatttaatgccgcaaaagaggctttgggcatgtaacattcaccacggacctcaatagagactggcttggttaatgtttgcggaatcgccttgatggtcttaagattctgggtaatgtcctccccaatcgtcccattgcctcgcgtcgcaccacggacaaattgccctttttcatagatcaagtcaatcgcgagtccatcaatttttaattcgacattatattcgatggcatgctcaacgtttttttgaagtcgattatcaaaagtcgcgagttcttcctcagaaaaaacatcgcccattgataacatcggtacttcatgcgtcactttcttaaagccaggcagaacttgatcaccgactttttgagtgggcgagtcattagtaacaatgattggaaaggccgcttctaacgtttctaagtcgcgatacaattcatcgtacacgtgatcttcaaccactggggcgtcctttgtgtaataggcttcgctgtattcagctaatgtctggcggagttcttgggccgccgctgccgcttcagtttgcgtatattgatcgattggtttagctaatcccataatgaagactcctcactgcttatgatttgaaacgtgctttttaaagctgactcttgtgcttagcttcgtattgcaaacgaccgactttgtcggtcattcacaacactgtgctaatcctcagaagataaccgtcggaaacgcactctattctactttttcaattggtgcgaagcttgctagtagtcttttaacgccttgttctttgaaggcgatatctagttcttggtcgttgccggtcccgttgaccttgacaactgtgccaatgccccacttcttgtgttggactttttggccggctgtccaagcgccgctgttatcgccgccagttgtgtcggcaatcttgtgactcgtcgttgttttatttgcattatacgttgtagccgttgcgcgtgcataacgattgctcttaccaaatggcacattgcgttctggaatactgccagcattgccatttgcgtaatccaataatttatcatcgatttcgccgacaaatcgggacgcttggttactttgttgacggccgtataacatccgtgaataagcgttggttaagtacaatttgctttcagcacgggtaatcccaacatatgccaaacggcgttcttcttccagttcgtcttcttctaataaagcacgtgatagtgggaagatgccttcttccatccccatcaagaaaacaactgggaattcaagtcctttagcagcatgcaaggtcatcatggtcacttcactggcttcttcttcgactgaatctaaatcagagaccaatgataattcggctaagaagtccacaaataaatcactgtcatcttcttctggttcataatgttcgtcgaattgtttggtaactgagagtaattcttcaatattttctaaacgactttgcgcttcgagggtattttcaacttcgagcgcttttttgtagccagtcttatccaataattgttccgttaattccgtcacgtttaaaaattcgcgcatcttcgctaagtcaccaatgacgttgccaaaatcgatcaacgtcttgcgactcttacctggaatggttgagagttccgcattttgcgctgcttcaagtaatgaccattgatgatcatccgcgaattgcgttaatttttcgagagtgccggggccaattccccgtttcggactgttaacaacccgttcaaaactcattgaatcagacgcattcacgactaggcgtaagtaagccaagatatccttgatttctttacgatcgtagaacttatgcccgccgaccatcttgtatggcatgttggctttgacaaacgcttcttcaattgaccgtgattgggcatttgtccggtataaaacggcaaagtcgccgaatttacgttggttcttttgcatttcttcttggatcttcgtaatgacaaagagtgcttcgtcacgttcactttgaccccgataataagtaattggttgtccttcgttattttcagtccacaattccttaggtttacgatattgattattgttaatcacaccgttggctgcttctagaatcgttttggttgaacggtaattttgttccaacatcactgatttagcatctggataatcatgttcgaagttcatgatgttgtccatgttagcgccccgccaaccataaatactctgatcggcatccccaacaacacagagattcttgtatttatcagctaacatgttaaccaatgtgtattgcgcttcattggtatcttggtattcatcaacgtggatgtattggaatttttcttgatagtgttcaagcgttggtttgttttctttaaataagcggatcgtttgcatgattaaatcatcgaaatcgagcgcttgattttgttggagtcgtttttgatattcggtgtagcattgggccacaattttttcgaatggtccgtttgctagacccgcatagtcgcttggtgtttggagttcatttttggcgttactaatcgtgcctaaaatcgcctttggttcaaacttcttcgtgtcgatgtttaaatcccgacaaacatggcgcattaacgtcaattgttcagaaggatccgcgattgtaaacgcgcgattgtagccaatttgttcaatctcccgacgtaaaatccgcacacaaagggcatggaaggtagatacccaaacatcttgagccccttcgccgagtaagttaccgacccgttcacgcatttcacgcgccgctttattcgtaaacgtaatcgccagcacgcgccatggtaaaacgtgcttttcttcaattaaataagcgacccgatgcgttaacacccgggtcttcccactaccagcacccgccatgattaaaagtgggccttctgttgtgaggaccgcttcagcttgcttatcgttcatcccttgtaacaattctttttcagacaaattagtcatccttccgtaaatgcaatcagcctatattataccaaactagataggtagaaaaaagcgaacacgatctagtaaaacggattctaatttttcgcaatcttctgccttgacctgggacgcgtttcataaattatactcaccttaatccaagaaaggtggtatgcatcatgattaaatacattttttctaacttagacggtacattgttaaaccaagacggacagctttctgaaaaagatattgcggctgtcaaagcaagcccaatcccaatttccttgatttctgcgcgttcaccacaagaaatgcaagctacgattgatcagttagcgttaacgacaccccaagtcgcttttaacggggggttaatttatcaaccgacagatcttttcccaatggttttagcagaatatccacttgcaacctctgctgtcgcaacattaattgccgcattacaatctgaatttagtgacatcagtttaagtgcgtatgacttacaccactggtacacgcagacaattgacgctggtattgaggcaatcgctaagcaaaccggtcaattgccgacgctcatcaattttggtgatcaattgcaaaatccatttctcaagcttttcaaaattcaactgattatgcaaacgacacaacaacgggcaactgttgctgatttcatcaaccaatgccacttgcctggtctttcagtacaacaatcaggtacaatgaccttagaaattacgagtcatgaagccactaaagctaacgcattaaccaccatcttagaaaacactggactaacagtcgctgattgcgccgcgtttggtgaaggtcaaaacgacttagccatgttatcgctagttggccaccccatcgtcatgggcaatgccagtgatcaaatccagatggcgggtcaattcattacgaagactaatcatcacagtggcttcagctatggtctaaagaaatacattactaaagttaatcaaaaagtaggttaggattatgccaacaattcgtgatattgcccgcaaaagcggctattcggtttcgaccgtctcccgtgtgttaaatcatcaaaaatacgtctctgaacctgccaaaacggcaatcgaagcggtcattaaacaactcgattacgtgcctaatagcttagcgcgcgatttaagcttcggtcaaaataaaactattggggtcgtcctaccgcacaatgaccatccgtatttcaaccaactcttaaacgggattatggatgctgcgttttcaagcggctatcacgttgtgctcctaccttccgaatataatcaagcagtcgaactagattatctcgaacaattaaaacgtaagaattttaccgcactcatttttacttcacatggtattgcactctcagtcttagcagagtacacgcgttatggtcaaattgtctgttgtgaagacccggggacccatcatatctcggccgtttattctcaccgtgagcccgcctatttagcggcattcaagtaccttaaagcccacaaagcacagcaaattggtctactattaagtcgtaatttagcgcaaagcccgacctggattgccgtcacgaacgcttatcaacaagttttcaactgccaacctgattccgagttaatggtcggtggcatgcgctcatttgaagatggctatcgcgccgctgaacaactggttgaaaaacagccaaccctcgcttgctattttacaaatggcgacgacattgccgctggtgtccgccaatatcatctggatcatcaactgccgaccccgcttttaattggtcaagaaaaacaattatccagttttttattgcaactgccaacaattgaccatcacttcttcaccctagggcaaaaagcgtttgaagtcgccctcagtaaccatcaccaagtttgtcgtttcgaatcagaatttattttgccataaaaaagccaccttaacctaacttttaggctaaggtggctttttatgtcggatgcttatgcaaacacccgatcaaaaattgtttgaacttgttttaagtgccattggtaatcaaaggcgtcgtctaaatcggcttttgaaagttcactcgtcactttcggatcggcttctaataattggcggaaatctttttgttcatcccatgctaaggctgtcttcggttgaaccaaatcataggctgcttcacggctcagacccgcatccactaacttcaacaagacacgttggctgtaaattaaaccatgggtgatgttcatgtcagccttcatcttttcagggaagaccgtcaacgtcttcacaatccgcgtgaagcgattcaagatgtagtccaataaaatcgtagtatcgggtaaaataatccgttcagctgagctatgtgagatatcgcgttcgtgccataatgacacatcttccatcccggtaatcacatgaccgcgaatcacacgggctaagccactaacgttttcagaactaattggattgcgtttatgcggcatcgctgatgagcctttttgacctttagcaaagaattcttccacttcgcggacttctgttcgttgtaaatgccggatttcagtcgcaaaatgttcgattgaggtcgccacgaccgccatcgtgttaatgtaatcagcatgtagatctcgtgggagcacttgcgttgaaatatcttgggcccggatccctaagtgttctgtcacataggcttcaatttcaggcggaatattggcgaaagtcccaactgcaccactgattttaccggcttcaacgccttttgctgcgcgttcaaaacggtcttgattgcgtttcatttcagcataccaggttgctagttttaacccaaacgtcgttggttcagcatgcacgccatgcgtccgcccaatcatcacggtattttggtattcgtaagctttatcttttagaacagccataaaattggcgatatcagcccggattaaatcgttcgcttgtttcaaaatatacccttgtgctgtatcaacaacgtccgttgaagttagaccatagtggacccactttttttcatccgctaaggattctgaaacggcacgggtgaatgcgaccacatcatggtgtgtgatggcttctaagcgattgacttctgccaaatcaaagctagcattcgcgcgaattttctgcgcatcctctgtgggaatatcgcctaattttgcccacgcttcgacagctagaatttcaacttccaaccaagcttgataccgatttttcgttgtccaaatggcgcccatttcgggacgtgtataacgttctaacataaacttctcctccaaatactacctaaatgctggtgatggtaaaacgtgctttttgtggcatctttctgtgcttaaccaaatttgccaaattcgcgattgcatcaccaactcgtcaaatccagttaatgctcaaaagataaccgccacaaatgcactctgttttgaaacgtgctccatcgggcatctttctgcggctagctacgtccgtccaacgatcgactgcgtcgctcattcgccggcctatgctagtcctcaaaagataaccgcccgctgtcgcactctaatataagtctgccgcttcgtaattatcgattaagggttggatggcttgtccggttgctgtgaccgatccaatctgttgattggtcgtgacgttgtgcaaattaaagtaccaatccggtttgatcttcatctgtgtttgaattaatgaccgttgtgcttcttgaatccctaaggtcatccccgcattattgaggcgtgatgggccgactgccaactgacagatggccttcaaatgatattcatattgcgagaaattcaaggtatgtgtcaagacatcgcccgttgcgtgcggtgttggcataattcgtttcacataaatattcatagcgggtgttaaaaagaattcaaccccaaaaacacctgtatagtctaatttttccccaattaagtgggctaatcgattaatttcagtcgcaacatcttgattaatccgtgctggcacaagcgacattttcaagcgatgatcttcaaactcattttcgatgactggcagtgtcacacacttaccatcttcagttttaacgaccatcactgatagttcttgtgcgtcgggaatccaagattccaaaatataagtccccaactcaagggcagcttcaatgttttcaaggtcactcggttgttgaataaaacgttgatactgcttaccgtaacctttttgaatgggttttaagatacatggatatccgattgaatcgattgcatcttgaatatcatctacatcaacaactgtcgcatagggcggaatattgatatttaaatcactcaaaaagactttttcgaggtaccgatcttgcgtcacagacaacacattactgccttgaggtagataataatgttgtgccagttgttcgagcactgtctcatctaataattcattcgtataggtcaacacttgactgacttcaccgagttggactaatgtttgataatcattgaattcaccatcgatctgactatcaattaaacgtgcaaatgaggtattttgcatctgcggggtcacaatcgcggctacccgataccccatttcttttgctttgagcgccaacatataggcccgttgatcatttccaataattccgatggtttgtcctggataaataactggcatcatattacctgctttcctgttcaccaaactgtatacccttattatagcgaatttaagcgttgtctgcctaatactttcctccatgataacaaatttttagacaaaaaaagagtgcctctcagcactccgttaaataacatttatttattttcgtctaaaaagacgacttgaccgtcttcaaacgctgcaattcgtgctaaagattccacttgaatgccgcgttgatctaacaattcgcgacctttttggaaagtcttttcgatgacaatcccgacaccttcaagttgtgcgccggcttcttcaataatagaaagtaagccttcaaccgcttgcccgttggctaagaaatcatcaatcactaaaacgcgatcgtctgcattcagaaacttcttcgaaattgaaatgtggttattcactttcttcgtgtatgaataaaccgttgcgctatacatgttatcttgtaacgttaaactcttgtgctttcttgcaaaaacaatgggaacgtggaatgctaagcccgcgaaaacagcgggcgcaatgccagatgattcaaccgttaggattttagtaatcttcttatccttaaataagcgttggaattcttcacccattgcagccattaaatctggatccacttggtgatttaagaagttatcgaccttcaatacgtcttgacctaatacttgaccatcttttttaatgcgttcctctaatagtcgcacgctgagctctcctttgtagcatcgttaaacatcactaccgatagtagtaacgactaataatgttttctgaaattgaattaaaaatagattaccacaaaaaaagcaacacaacaagctcaaatccagttattcagcgatttgaaaagagcctgtcacaaaccggaatttgtggcaggctcttttgagattaattagtagcagatttcccatgatttgtttcatagcattctttattgatcatattggtcgaggtggtaagccttaacgagctcaattaacttcgctggataatcagggtcagtcgcatagccgtcttgttgtaatgcatgggcagcttgctcataattagtggccgcgattacgtgtgcatactgcgtccggttccaagaggtcccataagcaaacaattgtacatggtcaagcatcgattcttgataattgttatatactctaaaacgcgctgttgtcgttacccactgaccatttaaatattccttggtcgtcatttccttggtgttggcctcattatcacccttaataccgaaataattatggtattgcgcagcaagtgagctcttcccccaatcactttctaaaatggcttgcgctaaagtaatacttggtaaaacatgatatttcgtctgtaattcttgggcatatggcaccatttttttaataaacgcttgcttcttagcttggcgcgattgttgttcctgtctggcttgatcggcaagttcttcttgggccttttgtccattataccgaactaataaaacgagcccaattccgagaataaatagactcactaaaacgaccactagccaatcggttgggtggcgtctcttcttagaatagtagttagctgttggtttgcgttttgtcgtcttgcgtttacgtttttttgccaatcctctgcctcaactttatctgaatctattctatattgtacacaaattcattcagaacaccaatctttaatttgtaacccccctttaatttctatttagcgcttttattgctataatattggctgtaaccgattacgatagtaaaggactgattttattgacaacgcttaactggggaattatcggcttaggcaatatcgccaatagtttcgcaacttattttaaccaacctgatggtcacatttatggggctgcttctcgttcactcgataaggcacaagcctttgccgaccaatacaatattccacatgcatttggtagttatgccgacatgctcgctgatgacaacatcgacatcgtctacattgcaaccccccacaattatcacttcgaaagcattatggcgagtcttgaagccggtaaacacgtcttctgtgaaaaagcgattacgatgaaccgccgcgaactcaatgcagcaaaggctcttgctaacgaaaagcacttgatattagctgaagcaatgaccatttatcacatgccattgtttgctgagattgaacgccaacaagtcgctaatcacttaggcgctttaaaatcaattcaagtctcttttggaagttataaagagcttgatccaaacaatcgcttcttcagtcccgcacttgccggcggtgcaatgcttgatattggtgtttatgccctctcatttgcacgtcggatgttaactgctaaaccagaacttgtagcgacgcaatgggtgccatcagaatccggtgttgatcagcaatcaacattacttttaaataatgccaagcatgaaatggtgactgttaccttaaacattcatgcgaagatgcctaaacaaggtgttctcgtttatgaaaatggctatgtcaccgttgacgattatccacggcctgacaaagccaccctcactttcccagatggtcgcgttgagaccattcaagcgggtgacgcaaccaacgcaatgaactatgaactccatgatttccaagaaacagtgcgcggaaatcaatcaaacgataccctcgaattatcaagcgatgtcatggacatcatgtcagacgcacgtgctgaatggggctttgtctatccatttgaaaaacgcactgatctcgattaatccattcaaaaaacctggccaatttggtcaggtttttttagagtattttagcgagaaccaccatatcttttaggcgaatcccattttcatagattggcgtttgatattggtcgaagaagtttttgcgaatttgttcgaaccgaaagccttaacgcaaataaaaaccaattgctgccaaactgccgtccccagtgccaactagcaatgattgaaacccttggtcaattgcaatcgtctgaatttgagtcatcatttgcccaccgaatcctcgatgctgccattctggccgtaccgcaatatttttaagttctacctgctgattgttgagtgccatcagatggaagaccccgatgacttgctgctgatcgcttacggtgtaaaattgcccatgcatcaaatagcgttcaatcatgccgacttcttcatccgctaacaatagatcatccagccactgtcgccgtgctgcgccctcaatcaattgatacgttaacatctccagctcaccacccaatcaaaaaaaggggtcgcgacaaaattgcttttgccgcgacccctaggttaatttttaaattagtttttgtttacgttaacagcttgtgggccgcggtcgctttcttcgatatcgaaagaaacgctttgaccttcttcaagagtcttgtagccttcaccttggatagctgagaaatgtacgaatacatcactaccatcttcgcgagttacaaagccgtaacctttttctgcgttaaaccattttacagttccgttttccatgagaaaaatcctccttgtgtcgatgacacattataaatttgtgtatttctggtggtccgatggaagaaagttcttttggaaacattcgtaccgcaaccattcaaaaagtacaaacatagtgtaacacaggcaacaaccattggcaaccatttggcaataaaaataaaccgttttctatcacggacaatcagcatccgtgtttttagacaagtgttattttatatgttgaatcatgccctaaataatttggctttttgctttaattacgttaagatagcagtataactttttctcattggagtgcttgcttatgctaaaactattgaaacggctattaccaattatcttcatcggggtgagcctagccgcttgccaaaaaccgatggatactaaacatcaactccaagccgatatgcaaaccgttgaagatgcgactaagcaacaacgaacagctctttcaaccctcgaaacaatcggcgatccagttcctgataactatctcacgattcaaaaaaaatatcccgacgaaaatctattaacgattgaagatactaagattgcgacgactgcggccaagcgcgaagcagcctttcaaagtcttaaagaacaacaagctgtgctcaaaccggtcattaaacgcctcaccaaactggtcaagcaagaaaacgatgaattgccgattgaacaagtcaaagatttaaatcaaagtcttaagatttcgacacttgattatacaaccttggccaccttctacaacgcggccactaaagcatctgatgaattttacagcgaccatacagatgctgatgcagacgaagacagtcttaaatcaccaatcaatcgtttaaatcaatattacagttcagtttatcaacaagccgaaattgctaaggtcaacatgaacacagttgctgcgcatgctaagaaagtgcaaaaacaactggaataaacaaaaaaggagttggacaaagtcacgtttgtccaactccttttttcaatctttaattattcaacccgtggcggaccacaatcgtcggctgtagctacccgcacttgttattgcgtccgtttaaaccgcatgagtggtgttgcgactagtggtgtcaccacagctgctaaggttgcttccattacagcatttaacgcaacaacgccaagcatcacgatgattaaatgggtcggatcagtatgatacatccctgccgcttggtgtccgtaaagcacacgcgttaagccaatcactaaaatggtattgattaaagccccgaaaatcccagctaaagccattgcaccggttttacgaattttagtttgatataagtgttggaacgtaaagccagcaatcatcccagccatcaaccgcggtaaaatagcgataattggattttgaaagattaaaagtgaaagcggatcgcctggagaggtataggctctaaataatgaaatcaaaccccaaattaatcctagaatcgccccttggcgtgtgcccaggatcacggccccaataatgaccgttaaatgaattgttgttacggctggtagcccaggaatgatattaatataaccgaccatcggaataaaactttgaatgattaaaaaagcggttaaaatcgccataatactaatcgtataagctgatgaatttttatgtgtcatcctaactgactcctaaactgaatttattgctcattatagcgatttgtcaccctagtttcaatcatttacatcaagggacaaaaaaaggtaattccaattggaattacctaactgaattatgatgcgggtgagaagactcgaacttccaccgggaaaattcccgacaagatccttaatcttgcgcgtctgccattccgccacacccgcgtaacttgctttatcactttaagccacgtacattagtataagagaaacgatgattgaagtcaattaaaattttactttggagacgattacatgcccattatccccgctaaactaaccgatattgccaaattaaccaccctgtatcaacaattaacgactgaaatgcatgtgctacaacccactaattaccaagctgattacacgcctgagttctttgactggcaacaaatgataactgatccactacaagcagtctttgttcatcaaaaccaagatgcgcaaatcgatgccttttgtcacgttacaacagcccaaacaagtccctcacccttgtttatcgcacaccgctttgcttatctcacaacactgtatgttgcaccagaggcacgccgccaccacgtcgctacacaactgctatcgtccgcaaagcaatggcaacaaacacaagcgctcgattatttagaactaaccgtgttagggaataatccggctgcgttggccctctatcagaagctgggctacaccactcagaatcaaactttacgcgccaactaaaaaaaaggccacccctatgtttaggggtggccttttttcattgaatttgtgtggtttgataaatcagtcgtccatgacaccgccgacaaacatagcgagccgtattcattcgacggcgacgtggatagacttgcccacagtctgaacatttataaatcacaattttgctcgatttagctgtcttttgtgcagctggtgcatagcgcgcacccccgacttgtgcaagtaattgtttaaactctgcgtctcgatgacggtaaccgcgatgcaacagatgcaggtgataatggcaaagctcatgcttaatcaccccttctaaggtctgtgtatcatgttcggtcaacatctttggattgatatcgatatgatgatcctgtaaatgatagcgcccgccggttgtttttaaacgccgattgaaatttgcttgatgcacaaacggccgattaaaaaactgcaacgataaccgttcaatcaattcagttaaggcttgatcagtcatttgcctttggcgctttcattgtcagttgtacgcgttcacgttcttgatcaacactcatcacccaaacctgaacgacgtcgccaactgccacttcatcagaaggatgtttaacaaagtggtttgccagttgagaaatgtgcactaagccatcgtgtttcacaccaatatcgacaaaggccccaaaatcaatcacgttgcggactgtgccttctaacgccatattcggtttcaaatccgccaaggttaagacatcatgacgtaacaatggcgccgtcatctgatcccgtaaatcacgccctggtttttgcaaactacttaagatgtcggtgattgtttcaatcccgacctctaattcagccgctagagccggtacttgcatttgtgcaatcgccgtcttcaacgcatcgcttcctaaagcatcaacggttaacccaaatgatttcaaaatggctttagccgttggataactttctggatgaatatcagtattatcgagtggattgtccccattaataatccgcaagaatccgaccgattgttcataagctttaggccctaagcgtggtactttcttcaaagcactccgcttttgataaaggccgttttcattgcgatattgcacaatgttttgagcagtagttgctgacaaccctgagatatgttgtagcagctgagggctagccgtattcaggttgactcccacactattcacgacatcctcaatcactgtatcgagttgcacagtgagctctttttgcgccacatcgtgttgatattgtccaactcccactgcttgtggatcaatcttgatcaattcagctaacggatcttgcaaacgacgggcaatactaatcgcacttcgttcttcaacgtgtaaatctggaaattctgcccgtgctgcatcactcgcagaataaacagaagcccccgcttcattgacaatcacatagaaaatttcccgggaaatagatttcaaacacgtcgctacgaattcttctgattcacgactcgcagtcccattaccgattgcaatcatttcaacttgatatttctcgagtaaagcagtgaattcatccgccgcttttgatcgtttgtcagctgaagctggtttgtgtgggtaaatgactaacttatccaagaattttccagtgccatcgacaacggctaatttacacccagtccgataagcgggatcaaagcctaatacaactttacccttcaatggtggttgcaacaagagatgcttcaagttatcaccaaagacactaatcgcttgttgatcagctttctcctttaattgcttgcgtaattcacgctcaattgccggtccaataaaccgcttataggcatcttcaaccgcagacttgatgaccattgctgacgctgaatcttgtccatacaacagatcttggctgatccgactggcaattacttgatcgtcaatcataattttagctttcaaaataccttcgttttcaccacgattaatcgctaaatattgatgttccgctaccttcgttaaatcggcagtgaaatcataatagatttgataaacttgcttctcatcggctgcttcgtctttaacttgactggccaactgaccattttgccaagtatattggcgcacccaattccgatattttgctgtttcactaatattttccgccaagatttcatgaacaccagctaaaacagcagctgtatcattgattttttgatctggattgaggtaagcttcagcttttgccaataatgcttgttcggttaagctaggtaaccctgcgataaactgcgcaaaaggttccaagccggcttctttagcgatggttgctttggtccgtcgtttttgtttatagggtaagtacagatcctctaaagcttgcagttgcgttgccgtttcaatttgttgtttgagttttggcgttaatttttcttgttcagcgatatttttcaaaatatcggttttacgtttttcgagcgtcgttaagtattgaaatgtgctttcaatttcacgaatttgaacttcatcgaggcttcccgttcgttcttttcgataccgcgcaacaaacggtacggtattgccttcttctaaaagacctaacgttgctttgatttgttgtggtcgatactgtgttaattgttgaatcacaagattttgaatatcaggcatctgattgcactccttttgcttcaattaaaaaaacagcccccgacttgggaactgtcaactttcgccctaagcgattcttgaaatattttggatgtatttagaaatccgttccgttgctttgtcttgattcatttctgaagctgcaaaagcttgcatatcaacggtttgatcatcatgcatgcttgtaattaaatcttcacagccttgaatgaaatcagcgtaagcaccgattaaacgttggttgttccccatcaaacgagcgggcgcaacaactgttttgaattgtgctaagaattcgtgatattgatcaacaccatctctgaagatttgtgctgtcttttgatagtcttgttcgctcatttcggctaacttaccatcagcaacggctgcttttaaaggggtgaaatacttactcatcccttcttgtactttttcagtattatcgattaaatcgttgacagcttggccgtatttggcaagcttttgttgcgttttattcatgtccatcctcctagtttcctatggtttagtatactaatttcccaatcggcttgcaattaaaatattaaagcatgtgtcattaatagaaaaggcatgcttagttcatcaaaggacatttacctcattaaaaaaacgctagcgacaaaatctcgtttgtcactagcgtcgattattacctatcttctcttcaacattctactcgtccacgactgaccaaacattaactttgtcaataagtcgatacaagcgaaaataactaaataaagtaagaaactcaacaaccaattattttgaacgtgagtaatccgttccagaccaccaaagatgaaaagtgatatcagaaactgtaagaatatttgcatacgtaatcctccctacaaaactcactaacataaaagttatttaatcacctttattatagtttaattgacaagcactttacaaggttggcaacaaattatttagccattctccgctggaagaacttcacaatttccacaatcacaatcaatgagaatgaggctgctaggacaattccccattggtgaatatcgagatgtgacacgtggaataggccgtttaagccaggtaccataatcgttgcggctaacaggaggaatgaagctaagacagcccagttgaaagctttattcttgaaaaagccaactgtaaagattgattggtgtactgacttcacgttaaacgcgtggaagagttgaatcatccctaacgttgcataggccatcgttaacgcatcagcatgtgctaagccgctcgcttgatgcactgggtacgtaatcgctaaggcatacacaccaagcgtaatcccaccttctaagagaccttgatagataatcgcttggaagacaccgccggagaagaagtttgacttgcgcccacgtggtttttgattcataatccccggttcagtgggctcaacccccaacgcaatcgctgggaatgtatccgtcactaagttaatccataagatgtgcaccggttgcagaatttgccagcctaaaatcgtcatcatgaataaggtaaggacttcacctaggttagctgacaataaatattgaattgatttttgaatgttggcaaagactttacgaccttctttaacagccacgacaatcgttgagaagttatcatcggcaagcaccatatcactggcgccttttgatacttctgtcccggtaatccccatcccaatcccgatatctgcggacttcaaggctggcgcatcattgacaccatccccggtcatcgcaacgactttaccatgtttttgccaagctctaacaatccgcaccttatgttctggcgcaactcgcgcataaactgcgtactgactgacttttttagcaaatgtctcgtcatccatttgatccagttcggcacctgtcacaacggccgcatccgcatcttgttcaggtgtaataatccctaaacgaagggcgatggcttctgcagtatcccggtgatcaccggtaatcattaacgtccgaatccctgctgaatgcgcatcagttacagcttgtttggcttctggtcgttctggatcaatcatcccgactaaaccagcaaagattaactcatcttcaatcgtcggatcaattgttgctggtaagctatctaacggtttatacgctaatgccaagacacgtaacgcttgtttagctaaatcgtggtttgttttgagtaaaaattgccgttcatcttcatctaacggttgaacatcgccattggcatcaataaaatgactcacgcgtttgagtaattcatccggtgcacccttagtggtcattaataattgaccatctttggcttgatgaatcgttgtcatcagcttccgttctgaatcaaacggtacttcacccacgcgtggtgctgctgctagggcatcttggatcacgaaacctttatcacgcccataagcaattaaagccgtttccgttggatcaccaattaactggccatcctctgtgattttcgtatcgttggcaaggttcataatgcttaacgctaaatcatcgcctgccaagtcggctgatgcttcttgcaactgattattggtaaaaatcttttctaccgtcatttgattcatcgttaacgtcccagttttatcggacgcaataatgtcggtactccccagtgtttccacagcaggtaacttccgtaccaacgcatttcgtttaaccattttctgtgtcccaagggctaaaataaccgtcacaattgccggtaatccttctggaattgcggcaaccgctaatgagattgaggttaataacatattaattggtgattgcgcgtggcgtaagtagccgaccacaaatacaacagccgcaatgattaaaatcataatcgttaaactcttaccaagttgacttaaattcatttgcaatggtgttgtggtttcaccagcttgatttaacatcccagcaattttaccaacttcagtttgcatcccagtgcccgtcacaaccccgacaccacgaccgtaagtcacattactattcatgaatgccatgttggtccgatcgccaatcccactttcaggatcggttaacgttgcaacagtcttatcgaccggtaccgattcacccgtcaaagccgattcctcaatcttcaaagccgctgattctaacaagcgtaaatcagctgggacgatatcgcccgcttctaatagcacgatatcaccgacaaccagttcttcactcttgattttaacaatctgcccgttacggcgtacatgtgcgtccggggttgccatctcttttaaagcatcaattgcttgttccgctttggcttcttggaaaacaccaaaaacggcattcaagataacaacggcgagaataataatcgcatctggccattcatgtgctaaaaagccggcaatcattgccgctactaataagacgataatcatgaaatctttgaactgttctaaaaaacgaacgaacaagctttttcgtttagtctcagtcaactgattacgcccgtatttagcgagtcgttcagcaacttggtcttgcgttagcccatcagttgttgtggctaaactttttaaagtctcatccgttgattgggtaaagaatgaacttggttgatctgtcattgtcgtgcctcctatagatagatttcggggtaaaaaaagagacctatagagaattcaaagaatcccccataagtctcactaattaagataacaccagaatattgccttgttggtggcgttatcgcagacaagctgccagttactcccttatcgttaaactaattataagacagaaccaatctaaaacgcaagtaaaacattattctgacgtccaattaatttagcggctaaacgaaatccagccgattaacgccaaaatgtatcaaaaacagtaattggtaaatgccgcttgtgcgctgtcttttggtaccacttttcaatcttggtagcagcctcttctgccacttcacgaccctctaaataatcatcaatttgatcataagtgacaccgagtgctaattcatctggcaatgctgggcggtcttcttcaagatcggcggttggaatcttttcgtaaaggtgttttggtgcctttaattccgccagcatcgctttgccttgacgcttatctaatctgaaaatcggtacgagatcagcaccaccatcaccgaacttcgtatagaaaccggtaattgattcagcagaatgatccgtgcctaaaaccgcacccttcatttcaccagcgataccgtattgcgcaatcatccgcacacgtgccttgatattacctttattaaaatcactgactgtcacttctgtttccgccagtgcttgaaccattgcatccactgacgctttgatattcacacgccggacctgatccgcttgcatgaaatcaatggcagccattgcatccgattcgtctgcctgttcaccatatggtaatcgaacagcgatgaattgataggtttcatcacccgtttcagcacgcatctcacggaccgcttgttcagctaaagcaccgactaatgttgaatcttggccaccagaaatcccgaggacgtatgtttttaaaaatgtattcttttttaaataatcttttagaaaatcaactgaccgtcgaatttccgctttcggatcgattgtaggttgggtctttaaggctgcgataatttcagcttgtaaaggtctcatgattaaataccaccttttttaaatgttagattgctaacttttttgaaacgcgcttccttcaacagctttgtccggcaaataagcgctagcgcacttattcaccagacttcactatactcaaaagctaaccgttgaatgaaccactctgattttggacttcttctttgactcttctgatttgggccattttgtgatcccatgtgcgttgtgaaaggtcaactgggtaatcttgcgggttcaagtcccgcttgtattcatcccataacgagtcgagattttcactacagaacttcttaatcgcgccaagttcgggtaatttgtaaacgcgttgcccgtgttcaaaaatcgtccgtagaattggccgcgcattaaagtccgtcacagttttattaatgtacgtgtaatttgggtggaacatataaattgaatcttgttccagtggatcttcatcccaaagcgtaatgtaatccccttcagatttaccatcaacttttttagtgattcgccaaacttgcttgcgccctggtgtggaaactttctcaacattacttgaaagcttgatggtatcgaccatctttccgtcgccgttttcaatcgaaacaagcttatagacagcccctagcgcgggttgatcataagccgtaatcaatttcgtgccgacaccccaaacgtcaattttggcttcttgcatcttcaagttttggatggtcttttcatctaaatcatttgaagcgtaaactttagcatcggtaaaaccggcttcgtccaattgttggcgcacgcgttttgaaatataggccatgtcgccactatcaatccgcaccccttggaagttaatcttactaccaaattcctgagcgacccgaatcgcacttggcacaccacttttgagggtgtcatacgtatccaccaagaaaacacaatcgtgatgcgtttcagcataagcgcggaatgcttcataatcattgcgatagacttgtacgagtgaatgcgcatgcgtcccactggctggaatcccaaaaatctttgaagcgcgtacgttacttgtagcgtcaaaaccgccgatataagcggctcgagtgccccataaggcagcgtccatttcttgggcacggcgcgtcccgaattccaaaacaggatccttgccgacaacggacttaatccgtgcagctttcgtagcgattagtgtttgataattgatgatgtttaacaaggccgtttcaattaactgacattgcgccaatggtccttcgatttgtaaaatcggttcattcccaaaaaccaattcgccctcaactgctgaacgaattgttaaatcaaaatcaagattggctaaataatcaagaaaatcagctggataccccacctcatcacgtagataagcgatgtcactttcggtgaagtgtaagttttctagataattcacgatgtgttctaaaccagcaaaaattgcgtaaccattttcgaatggtaattttctgaaataacattcaaaaactgctgtgcgattgtgcaagtcctttttaaagtaagtaagcatcatattcagctgatacaagtctgtatgcaacaaaagactgtcatcagggtataagtttggcatgttaagctcctaattagagatatatttagtataactatatcataaaataaaagaggcatacaaaaaagacggtagaaaaccgtcttttttgtttgagactagaagaaacgccaaccccatttattaaaatactgtgccatggacttcaagaagatcttaaatcccttgaaactgcggtgggatgccattccataaaaatgagtgacaaccgcgtctggtacatataaaatcgtatgaccgctttggttaattcgatcacaaaggtcattatcttcgaaatacataaagaagcgttcatcgaaaccatcaatagcccgaatcacatcagtccgcgtaaacatgaacgcaccagatccatattgaatcacttgccgtcgatccgttaaatcccggcattcataagccgccaagcgtttttcaaatagcttcttaacccatttaaaaggtacaaagcgcagcatataatcgaagacatctagcttccgccgtactaaatgttgggtcgtaccatccggaccaacaatcttcggcgttagcatccctaagctatcattagcatcttgatccgctaaaatccgatacatctgttcaaatgcgttttgatttaaaataatatccggattgcaaatcagaaaataatcggatgccgtcagcttcaggttggcattatgcccatgaccgaacccaagattctcttggccttcaatgatttcaacatcatctgcagcataggcttttaattgcgccaaatactcaggtgttgacccattatcatgaaccaatacttttaccgggtattgccccaagacagttgccttgatactatctaacgtcttaaagacgtattgactattataggtcacaatactaatcgtcaccgttttatccagattattactcatcatctcatcctaatcaatttttgccataaatttttgtaatgccacttgccaggttggtacttcaaaaccagttgccttgaccttcgtcttttttataaatattttttgaatatttattcaatctcgtttgacccgttatttcgttagcaatgagcttttctctcgctgacaacatagaatactataccaacaatccaagacatcgtcaagcgattgtttacttttttttgaataaaaatataaaaagtttcaaaagcgtacattgttgaatagatattcaccgattgtccgaactaattcaagtgcgggacactcgtgacttctaacttatccagtaattccgtgaactcactagggttcgcaaatcgaaaaccggcttcactaattattctcaattgttcggtataaaaatcagtctcatgagctccccactgaaagacaaagaacgaaacgttctcaccttcaaggttaatattcgctaaattgatcaatctcaattcgttaacatcaatatttagctgtgcttggattgcaattaatacagcagcaagtggtgtttgatcatcttgcttattggtcaccagcatcttataagaagcatcaacttgtggttggaccaaaaaatcatattgtccttgctctgtcttatacataatcgttccggctactttagcactcatacattctcacccttattcaagtcttctatcgcttcttcagtccatcttggtaatcgttctgcaatgggcgcaaacccaatatgaatccggcgatttgtccaatagtgtttcttagcacgctgtggtgctaaatcttgtgctttatgtagcgcacgtaacgacaaactaatcttatgtgtgtattcatcgatatctaacactaatacatctaacacttgaccgactttaaactgttcatctaacgctttaacaaaaccatgaccacattctgagatgtggattaagccttggaccgttgcatctaatgaaacaaatacaccatatggttgaatgcctgttacagtacctgtaatcttttgtccaattcgataacccatattttcctccatttcaatattcctatctattttaagccttccagttagtaaaaggcaagctatcggctaagaccttttatacaatttcttctataatatgtaaaaagaacctgaggaaacatccctcaggttctcatttaactaaagttgatcagctgctagtaaaagtgccccagtaatcccagcgtcatcccctaatgcaacatgcacgatgtagtcatcaaggtcaggcgtttgcacataacctgccatttgacgtttaaaggattcacgaatcattgggaatagttgggcttgtttcgacaccccaccaccgaagacaattcgttctggcgatagcattaaagcaatatttacacaggcttgagctaaatagtcagcttccatttgccatgcttgatgatcagccggcaataagtggcctttcttgccccaacggcgttcgattgctggaccagctgctaagccttccaaacaattgtggtgataaggacatgtcccttcgtatgaatcttctggttgttgccgaattaacatgtggccgatttcaggatggctgtaaccttgtaaaatctgaccgtgttcaacaacaccgccaccaatccccgtcccgacagttaagtaaacacaactatcaagtccatcagcagcgcccatcttcaattcaccataggctgcggcattcacatccgttgtaaaagcaaactgggtatcaggataatgagctttcattgctcctaagatatcatagtgttcccaccctgctttgggtgtatcgatgattgagccatatgtttttgatttcgggttaacatcaattgggccaaacgatgccaaaccaatggcatctaaatgatcgaattgatcaaaatattcaaataaccgtggcatcgtttgttccggcgtctcggttggcatactaattcgttcttgtatcccattttttccatctgttacggcacagacaaacttcgtgccccctgcttcaattccacctactagcatctaaaacacctcttcaattaaaattaatgattaatcgtaatgtgattgatgataacttcttcaactggtttgtcttgcattcctgtttctgtagcgttgatcttattaacaacgtccatcccactcaagacgtgaccaaatacagtatgtttaaaatctaaccaaggtgtaccacccttttcataagccgtaatgacttcttctgggtaaccagcacctggcatttgtgacaacatgttttggttgatatgttcgtttgttacgatgaagaattggctgccgttcgtattaggaccagcattagccattgataatgcaccatttaagttaaagacttcttggttgaattcatcttcgaaaggttggccccagagactttcgccacccatcccagtaccggttggatcgccaccttgaatcatgaaatcgttgatgacccggtggaaaatcacaccgtcatagtaatctttttcagctaagccgataaagttttctactgtcttaggtgcttggtcttggaaaagtgctactgtaaattcgccacggtttgtgtcaaaagtagctgttggccctgcaaagtttgcaaggtctaattgtggatatgtcatttaatcgtcctccttgttttgactcacaatcattatgatagcgaattgcttcataaattactacgattatttcattaaacatgctttccttatttttttctagtatactaatttaagaaatctactattaaggaagttatctcatgcttgattcaaatcatctctttgatatcaccattattggcggcggccctgtcggaatgtttgctgcctattatgctggtatgcgcaaggccgatgttcagattatcgaaagtctccccgaactcggtggtcaagtcgcaacactctatccagaaaagcaaatctatgatgtcgctggtttcagtggtatctctggtgcacagctcaccgaaaacttaattgaacagctggcacttttccaaccaaccttgcaattatccactgctgtgcaaggtatcgaaccccaagaagatgggactttcgttcttaaaacaacgaagggcacgacacgcaccaaaggcatcatcattgccgttgggaacggggctttcacaccgcggaaactcgctgtcgattacgatccagaatgggaaaatcactatattcactacttcgcaaaagaaatggcgcagttcaaagatcaaaccgttgccgttgctggcggtggtgattcggccattgaatgggcactaatgctcgaaaaagtggctaaacaagtctatttaattcaccgtcgggatcaattccgcgggcttgaaagtagcgttgaagcactcaaacaatcaactgtccaaattaagacgccgtttttaatcgatagtttgaccgaagtgaaccaacaactcgcattaactttaaataagatgaaatcaaccgatcaagagcagctaacaattgacaaactccttgttaactatgggtttatctctgatactcgaattctccgtgattggggattaacattggaccaccatcaagtcgctgttaaccaacaactcgagacgaacatcccgaacatctatgcgatcggcgatattgctacctaccctggtaaagtgaagttaattgccagcggatttggtgaagcaccaatggctgtgactgagttactaacgaatctctacccagaaaaacgccaaccactacacagcacgtccattatgtaagagtgcgcaatatgcccgattaccttctgaggattagcctagtccagtaaattagcgacgcagtcgatgatttactggccgtagctaaccggaagaaggtggcttatggagcacgtttcgataagagtgctttaactagcggttagcttctgagtatagcatcggttagtgaatgagccgcacagccgaccgtttgcaaaccgtggctaaacggaagaagttgctagctaaagcacgttttaaaaaagccctgcatcaacgttttaaccgttgatgcaggactttttagtattttattaagcattattttttttcatttgactcttaaccgctgtgataaccatcggaatcaatgagaccccgataatccctaacacaacgagtgagaaatgttcacgcacaacagcaatgtttccgaagaagtaaccagctccgcaacagagtgtcacccacaagatactcccaatcacgtcgtaacggaagaacttcatgaaggccatctggctcccaccggcaacaaatgggacgaatgttctaataatcggcatgaaacggccaattgcaatggttttaccaccatacttatcaaagaagacctgcgcctcttcaattttctcggtattgataaacttgccgaagaaccgattcttcgtggcggctaaaccgacccgttggccaatttgttcattcaatgaatcacccgcaattgaggcgattaagaacaaggcagcaaacagccagacattcaagtcattatcagtccgggctgccaaagcagcagcggcaaataaaagcgagtcccccggtagaaacggtaagataaccgccccggtttcaacaaagataatggcaaacaagatgacataggtccagttgccgaactgattaacaatgttgaccaggtgggcatcaatatgtaaaacaaaatcaattaactgcgtcatgcgatttctcctatactctttttcaatttaaaaatatatcccttattaggataccgaatccatgcatcaaagcaatcacttttgcattttcttaataaaaagccaaacgttatagcgcacgtttaccgcgccataacagccaagcaaaactaccctctaacaaaatgaagaagagtgcaaaacaaaggccaaaatagacttccggtaacactaagataatcggatcagtgattggatcaaactgccagttcagattgtgaaacaataattcgtggaacgtaatgaaaaaccgatcgaaattcatactagcaataaaccctaatatgggtggcaccacaagagcaacttgcattgggcggacgtattgccaaacccgattggtcttgcgccgactccgccaatgctgaatcgccgctccaatcgttactagccaaataactactgctaaaccaaacaagcgtttcacttcaacaaaatgttgccgaccatccaatgacattggaaagtcaggtagttgtaagcgtggttgccatggcacaagtaagtagcccattaaccggttaaagttcatcatcagccgcggttgcgttaattcccgttgactcgctagatcgaggtagtgactcactagcggataaagtgcccagcttaacaataacgttattaaaatcgcactgctgactaacgccaaatacaacgccgcccaactagtggtacttctaacccgctttaaacgtcccattcggttaggtcgttaatgatatgcgttggttgcaaggcttcttttgccacatcctctggcgttgaaacaccagtgtaaactaacaacgtatccatccctgcattcaagccagccttgatatctgtattgtagttatcgccaaccatcaccacttgttccttcgtcaagccgaattgctctaaggccatttccataatgattttttcaggcttaccgatatagagtgcactttgttgcgttgcccgttcaaccatcgcaatcactgaaccagcacctggcactagcccgcgttcgtttggtaaattcgtatccgcattggtgccgatgaataatgcaccgcgcttaatcgctaacgttgctaattcaaacttgtgataagtcacatcataatccaaaccaactaccacgtagtctggatcgaattcattggttctaaaaccggcatctgatagagcctgcttcaaaccgagttctccaatcacgtagaccgttttgccattcgctgtaccaccgtttaaattcaatagatagcgcgccgttgccaaagaaggggtatacacttggtcaactgtcgcatgaatgtcatggttatccgccaaattctgaatcacagcagctggtgatttcgtagtgttgttcgtcaaaaacataaacggaatttgttttgcttgtaggcgttcaatgaaatctttggcttctggcatccgatcacggccgcgatacacggtgccgtctaaatcaattaaataccctgcataatctgtgtttgtcatagttgtctaactccaattacgttttactttttattgtgttccaaaggacggatcttaaaatgacgcttattaactgatttttgattctcggttaccgccttttgagggcgttctttagtcactttttgcttgttatcggtgactttccgttctgtaaaacctggcttttgacgccgacgccgttgctgaccacgttggcgattactccgccgattctcattcttaatgattggcttgccttgacgttccaaaacaaagtaggcacaaccaaagttgcagtattcgtatagataatcttgtaacgtattgattaattgatctttattagcgcgtttgttggttgctttgtaaaagcccttcaaacgcagttgttcaaagccccagtcagccacaatataatcgtacttagccaacacttcattatagcgttcgttcaacttttcagcgtcgaagccttcacgatagttcacaacgacttcataagcacatttatcaatctcaagcgtggtttcagtcttcatgacaacgtgttgtggcacttccggttgtttggctgaagcgatcatttctttttcaatcgccttggtcactttcttggcaatcttgggactgtttttcgtatccgccacagcgaacctcctcttcccttataagggataatgtttacttaaatatttagcgaccgcgtctctgagaaaatcagggaacacgatctcggtctcgccaacaatctcaattgttggaaagaatggaatgaatagataatgatcgacggtcgtcaacgtatagctggcttctggatcaatttcttgcccatgccaaaagacgcgccgcaatttcatatcaaccgctatcccgtcataaacgatgtctccaaagattttaccacggaaactcatccctttaatagggaacttgcgtaaaaagagccggtttttctccatttcaagcaccatccgccacaaatcataccctttgagcgtcactttaatcagatgcattggatgcggtaattgagtttgcaaatcatctttagtaacaatcccagcctgcaaatcttgcaagaacaagccagtattcaatacggcagcttcagtgctggtcgcttcttcaattgcctttaaaccggtcgtcatcatttctgattcaccaattgcgttgattttaaaagcgtgtggcaacttggcaacatgctcggcggctaattgtgcgtgcccctttttcaggtagccttcaatttctgctgcgtcagtcttcacaactggtaagtccgcggttaaaaccgtccgagcacttttatgcatcacatggtgctgatcatccagttcaagcgtgatatcaccaaggtaatgaccgtacttctcggcagccgtcaataaggtttgattaaccagcagcccctcttctaaaagatgatgcgtgtgcgcaccacagacgacatcaatctcagggaattgttccgccagccacttatcagtcgtaatcccaagatgtgataggacgattaagatgtcatattgaccttcaatcgccgctaattgccgcggcaactcttcactgacagtcgtcggttcccaaccattcggccgataagttaagaaaaatggtgcggtcaaggcaataattgctacccgcgttccagcatcggtcgtcattagtcggtaagattgcgcaaatgctggcctttcgtttgttgcttgttcatacagattagccagtaataccgggaaattcgccttatcatacaaatgttccagatcagcatgactattaccgattccttcattgtttccaatcgttactccgtcatacccaatttgattgagtaactcggtattaatctgaccattcgttgcttcagtcaatggatgactacgatccattgcatccccgatgtcgaaggtcaagaccgtatccccttgctttcggtatgctgcttgatgttctaagaggaagcgccgcattctgggccaattttcaaaatgtgaatgtaagtcattcgtgtgtaaaatatgaattgtttccattttgcttactcccttcagctagtcgtggctggggtttgccagcgcggcttgtttgcgttcaaaaatgatttcaatctcatttgccgcaaggggtgttccaaacggcacccgttcaggtaataattcgcgctctggtgcatcaatcccgacattgatattctctgcaatcggcaacatataatgatgaatatgtccgtgcaagttgaacgtctgttggacctttcccaataataacggatagtgggttaaaaaatactgatggtgattgatcttaattagctcaccgacatcagcaaattgataatgcgccttgccagctgataatcccgcatcatgtttcgccaaatatttcaaaaaagcacggttatcatgattacctttaataataatcagctgcccattcaactgctctaacacagcagcgacttcagcaaaagcactcggcttattgggcaccattgcgacgtcacccaacaaataaacctggtcgtcagcttgcacccgttgattccagttagcaataatcgttgcattcatcgtagctacatctttaaacggacgcggcgcaaaatcattattacctaataattcggcgtgaaaaaaatgcgtatccgctgtgaaataaatcattcacaatcccacctaaccaatatgatttgcttttaaaatctcctgaaaggcttgcgcaactgcgccgtcttcttttttccattcttcccagtggtcaaaatcaaccgcaggcattgtgtaacgttcattaatgtaagcttcgtaagtttggaccgcattcgaatgcggaatgttgagttgtaaaatccggacttgcttaataaatccccggttagccgctagttcggcacgcccattcataaagatgttagccaattcataatacgttgtgccatctaagcgcgtaatttcttcaataatatcaaatgtttggtacttctccgccattgtgttacttcctattctaatccgatttcagttacgtttattctaccaatatgtacacaaaaaaaccactacccgcagatagtggttggcataagagagaaagagaattgataaaaaggtaattgcataagtaccttacaaacataatataccgtctaatgtaagcgttgtcaattgttatttttaatttatttatccgtttctttaaagttctgtaacaatcgtaggcatttgaaaggaataatggtatcttaaaaagagtagtttttatcaattgaggaggccattgatttgtcacagcaacattcacgatgggggcttttagtattaacaagcctttgtttctggtttttaaccggttttaccgttgtcgctcatcgtggcgaccccatcaacgcacccgaagaaacatttcaaagtatcgacatggccttttcgcaaggcgctaactatgtcgaactcgatttacacgaatctcaagatggcgtcttagtcatctcccacgaccgtaacttacaacgcgtcacggggaccgatgcgattgtttcgcaaaatacttttgccaagctcagtgaactcaaaatgagtaacggggaaccaccacacagcgtcgatcaattatttgagcactatcaaaacaacccaaatgcgaaattcctcatcgaaaccaagaaaaccaaaaagggaaatccgcaggacatggaagcaaaactcgtagcgctgattcaacaatatcacatgcaagaccgcgttatggtccattccttttccctcgctagtctgcaaaacatgcaacgtttaatgccagagattccccgcatttttatcgttggcagtttacagcggatttcattcgagagttttaaatacgccgacgggattaacatctcatcatccctcgtcaccccaaccatcattaaacagctccattatctccatcaaaaagtgtatgtctggaatgagatgtctgaaaaccaagcgacttggaactggttagtcaacctaaatgtcgatggcgtggtcacgaactatccggcactgggacgccactatcaggccgcacaggatcaagcagaaagtgaagccatcgacacaattgggcaagtcaatgacgttcaagacctccccaccgttgaaaatccatatgaaccaaccctcaataaaaagccggctaaagcgggccatatctacaacatcaccgaagccgttacaattgccgatcaaacttactaccgcattggcactaaccgctttgtcctcagcgacagcatcaacgtcggtgaaacagcgaaagccgctgctttattggtgggtaaaacggcgcagattaaaccaactgcgaacattgtcgctacttggaataatccgctacaccccacccagacaaccggttatcttagtgccaattcacaacagcaaattttaggagtgcgctatgttggtaatcaagtctggttgaaagtcgctagtggttggttcaagagtcgccaagcattaatcgacttcaacccaaaccaatcgctgatggtaacccacttttaccgtgaaattccccaacaattgcggccaaccaacttactgattaacccagcactgccactgccactgcaattgccccaacaaccaccagtcgacgcgcaactgtttaaccagtttgcccgttctctacaactaactaccattaaattctaacgaggtcaccttttatgacatcagattatgaacaattgattcgttccgtccaaaatactcttccaaaggaagaaacacttgatcacatctcaattctttttaaaatactaggcgataaaacacgcgctaaaatcttgtacgccctctttcaatccgaattgcgggtgagcgatattgtcagtgtgttagagatgtcgcaatcctcaatttcacatcaattacgtgcactcaagcaagcgaaactggtaaaaagtcgtaaagaaggcaaggaagttttctattcattagctgacaaccatgtcatcaatatcttttcgcaagttatcgcccacgtcaacgaacactaaggatcctattggcaccgatcaaattcactttggtcggtgctttttttatgtcccaaacccatcatctcgattgcattctatcgtgtttggtggtatcttatagtcaacatatgaatatatgctcatacgtttgtttatttagtaaagattacgatttagcttttcactcaacaaggaggcctaaataacatggcacaacttcaattaatcggcatcgattgtgccgcatgtgctactaaaattgaaaagaacgttaacaagatggccaacgttaaaagttgctccgtcaatttcaccactcaaaaattaaactatgaactcaccggccaagaagctgttacggaattcgaacaacaactcgctactcttttgccaaccattgaaccagatgtggggattcaacaatcaccaaccccagaaccatcccccgcaaaacatgcgattaattatgatctcatccgaattctcgtcagctctttaggcttggcgatttcttatctggtccctttaagcgcgccagctaaaaccacgttgctcctagctgcctttgtagtcatcggctacgatatcgtctggaccgcaatcaaaaatattctccacggcgaatggttcgatgagcatttcttaatgtcaattgcaaccattggggcctttggaatcggacaatatgccgaagccgttggtgtcatgttattctatcaagttggtgaatatttccaatcattagcggttaatcattcccggcgctcaattgctaacttagtggcaattaaaccaaccatcgccaatcggttagcggctgatggcaccaccgaagttgttgcacccgaagcaattcaggttggcgaacacatcgtggtgaaaccaggggaaaaagtcccgctcgacggtgtgattactaccggcgacagttacgtggacacctcagctattaccggtgaatctgttcctcgcgcctttcatcctggtgatgaactactcagtgggacgattaaccaatcaggtttattaacgcttgaagtcacgaaaccttatgctgattcaaccatcgctaagattttagaccttgtcgaaaatgcaagcagtcaaaaagcgcctactgaaaacttcatcacgcggtttgcaaaagtctacacaccaattgttgtcggcattgcagccatcatggccattgtaccgccccttttattcggtgctccatttggcgattggctctatcgggcattgattttcttagtgatttcttgtccatgtgccctcgtcatttcaattccactcggctttttcgctgggattggaacggcttctaaaaacggcatcctggttaaagggagtaattatctcgaagctttaaacgatgtccaaaccgttgttttcgacaagactgggacattgacccaaggtagtttcagcgtcaccaccgttcattcggtcgatcaacaacctgatgaacttttagcactagctgcccttgtcgaacaacactcgacccatccaattggtcaatcgattttagcagctaaccaaacgccactcacaaagacgttatctgacgtccaagaaaccgctggtcacgggattagcgggcaactcaacggacaacttttacaagctggtaaggctagttggttacaagccagtggcattgcaacactcacacctagtgaagtgggcaccagtgtccatgttgcttacaacaaccgctacttggggtatatcgtcattgcggacaccgtcaaaccagatgcacaaacggctgtcgcgcagctaaaacacgccgggattcatcaaataatcatgttgactggcgataaccaacccgttgcgcaacaagtcagcgccgtcttaggtatcgataagtatcaaagcgaacttctgccgcaagataaagtggccgccatcgccaaactcacagaagaccgcgctaccaacggaaaaatcgtctttgttggtgacggaatcaacgacacgcccgttttagcccgtgccgacgtgggcgttgctatgggcgggttaggttctgacgccgctattgaagctgccgatatcgtcttgatgtccgatgaaccgacaaaattagcaactgcgatttcgatcgccaagtacacccgccgcatcgtttggcaaaacatcattttcgcattagtggtcaaaggcatcttcttattattaggcgcctttggaattgccacaatgtgggaagccgttttcgccgatgtcggggtaacgttaatcgcgattttaaacgcacttcggattttaaagaagcactaaccttaaagggttcatggagactttgtgaaccttttattttttaatggcaagcgctttttaaatctgtaataatatgctaaaatgtgaatagattaataattaattaaccgttttttggttaaaatttaacaatgaaagctgggactgcaatgacattgaattggcaacaagaagcagcaaagtataaggatcaaatgcttgctgacttaacaagtttactcaagattaatagtgcgcgcgacgttgaccataaagaagacgacgcaccacttggccctggcccccgcgatgccttgctacaattcttagcaatcgctgaccgcgacggttttacaacaaagaatgttgaaaacgttgcaggtcgcattgaactcggtagtggcgacgaaatattcgggattttaggtcacatggacgttgtgcctgccggtgacggttgggaaacaaacccatttgaaccagtgatcaaagacggtaagatttatgcccgcggttcatcagatgataaggggccttcaatcgcagcatattatgctttgaaattattaaaagacaacggtatcgaattaaacaaaaaagtgcactttatcgttgggactgacgaagaaagtgaatgggttgggatcaaccgttacctcgaagttgaaccaaaacctgactttgcaatttcgccagatgcaaacttcccaatcatcaatggtgaaaaagggattgtgtcatacctcatgactttcaaaccagttgacggtgctgatggcgatatgacattggttagcttcaaatctggtttacgcgccaacatggtgccacaaacagctaaagccatcttaacgggtgcaatgccagctgatttccaagctaagtttgacgcctatgttgccgaccacaagttacaagggacaatcacaactgacggtgaccaaacaatcatcgacttaatcggtaaaggttcacatgctcaagaaccaaaagccggcgtaaatgctgcaacacacttggcaactttcttagctgactttgccttagatactaaaggtggcaactacatcggaacaattgcccgcttaatgcacgaagattcacgtgggcacctcttaaacatcaaccacacagatgatgtgatgggcgacttaacagcatgtcctgcagtcttcaactacacacaagatggtgtagcaacagtgctcttgaacgtccgttatcctaaaggtgtgactgctgaaagcacacgcgacggtttagcaaacacacttagtgatcttgctgacgtaacaattgacggtcatgcacaagaaccacattacgtgcctggtgacgatccattggttgcaacattattaagcgtcttcgaagaacaaactggtcttaaaggtcacgaacaagttatcggtggcggcacatatggtcgtatcttagaacgtggtgttgctttcggtgccttaccagaagaacgcgaaaatgtgatgcatcaagcaaatgaatatatgcacattgaagatatcatgaatgccattgcaatctatgcagatgcaatttacagattaacaagatagagtgcgtaagcaggcgcttatatttcgagcattaactggatttgacgaattggcgatgcaatcgctgattttgcaaatttggttaagcgcagaaatatgcctgctgaaacacgtttagagtgtgacgtaagtcgggtatccaccgaggattaatacaaagttgtgaatgattgcgtagcaatcgtttgcggctcagggttaaccggaaggatatggctgatagaacacatttagcaatcaaaaaaaacggtccaaagcttaatcgctttggaccgtttttttgattgccttcatttatcagcaggcatcagcttaaacgttgaatgcccatctttgacaattgcgtataagatttgttgctttgtttcatcgaagtaaccgagattaacagccatttcgccatcaatctcttcaatcccctcaaaatgttcccgaattatcgaacgaacaaccttcatgttatccatgtgtttttgaattttctgtacagcaacccctagcgtgtagccttcatctaagaaatgcttgataaagatcgccttaatcattgtttgcgcgtcgtactcgcgggccttattgccatccaattcacgcgctttaatgtatcctttttgctcccagtagcggagttgacgcggtgtaacccccgccattttacaaacttcactaatcccaaaaatcaatcgatccgtatctattaactttaaaaaaaggtctttttgcaagtccccactccattcctattattatttttcattatagataatctattgggattgtcaagttaaataacacctttgtcaacttacttgacaaagataccaaatgcgtctaaactaataaatcgcatcaacaaaaacacacaaaggagatttttatcttgtcagacgctagaccattagatattcatgggaaaccatataatcggacagtcttagtcttggtcttattgattggtactttctgtaccgtcttgaaccagacgattttatcaactgctttccccacattaatgaaagcattcgatgtgtccacctcagccgttcaatggctcacaaccggtttcttactagtcaacgggattatgatccccattagtgcttggttaattaaccgattcaattcaaaagtcctctacatgtcagcaatgactgtcttcttaatcgggactattatctgttacatcgcaccaacgagctcatttgcaactctattaatcggccggcttgttcaagctgctggtgttgggatttcaatgcccattttgcaaaccattatgctcaccatcttcccacctgaaaaacggggaacagccatggggatggccgggattgttatcggcctggcacctgctttagggcctaccctttcaggctggattatcgattcatacaactggcgtgttttattcggcatgattattccaatcgtgattctcgtcttagtcctcgctagtttccaaatgaagagtgttattcaactttcaaaacctaaaattgatggcccttcaattattttatcaactgtcggcttcgggagcttgctttatggcttctcagaagttggcgataaaggctggggcgatgcgctcgttctcacaaccttagcaattggcgttgtggtaattgctttattcatctggcgccaactcacgatggaaaacccattcttggaactccgcgttttcaaatcacctgtcttcacaattgccgctattttaagtggtgtgacgaacatggcgatggtcggtgccgaaatggtcttgccactatacattcaaaacattcgtggcgaatctgccttccattcaggcttaacgttattagctggttccctcatgatggggattatgatgccaattacgggccgtatttttgataaatatggtgccaaacgcttagcaatgaccgggatgttcttattgatggctgcaactgcgccattcatcttcctaacagctactaccccaatcatctacatcgttgtgttatacgctgtccggatgtttgggatttcaatggtgatgatgcctgtcacaacttccggaatgaacgctttaccaatgaacttaattagtcatgggacagctgttaataatactttccgccaagttgccagctcaatcgggacagccatcttaatcagtgtgctttctagtgttacaaaaggcaatatgccaagcacacacatggtcaagacattaccattggccttccgcgataagatgattgatgccaccctttctggttatcacgcagccttcatcgttgctgtgattttctgtgtgattggcttcatcatcacattcttcctctcttcaaagaaatctacgattaatggaggtgccaaggcatgatcgtcattacactcgttatcagcacactcgcattattcttttcatcgattttcggtcaaaagatgtggcgaccaatcttaatgaccatctttggactcacatttatcgcttcactcgttttcatcgtccaaaatgatcacaatcattacggaatgaaaactgtgaccgaaactaagacgcacacgctcgtttcaagcgcagatgcgaagggcatgtcaatgcttctctatcacccacttggtaacggcactgaaaaagtctatctttatcggaccgatgccaaccaaagtaaacccaaagcaacccaaactgaaaagacaaccaacagtgttcaaaaaaatgctgataaagcagtcttagtgacaaccaccaaataccgcgtttatcaaaataatacggctaaattctggttcggaatttctggtaacgaccacgaattcgtaagtcgtcacaacacatttaaggttgctaaaggctggttcgttctaagtgatgttcaagctaaacaactcgctaaaacattaaaaggtcaacaagcacaacttaaaactggcgcagaaaatgccggtaaacaagctgtgatggctgctatgcaagccaatccagcaatgactgctgatcaacaacaagcggttgctaaaaaagcagcaattgcctatcaacaagccgcaatggctaaagtgatggcaacattgaaataatgcaatcaaaaaatcccccacatcgtgatttgatgtgggggatttttttgtggtggaaatgtgctccgtcatccatatccttgcggttaaccctgaatgtcaaacgattgctgacgcaatcattcgccatcctgtgttaatcctcgggatatacccagctggctacgcactctgttttgaaacgggctttttgaaacatcttcctgcgcttaaccaaatttggcaaatcgacgatttcatcgtcaattcgtcaaatccagttaatgctcggaagatacccgtttcaaacgcactcttattttgaaacgggctccatcaggcatactcttccggttagttacatatcgaaaacgatcggctttgccgctcattcacgatatgccactaatcctcagagcataaccgcctgctgtcgcactctatttgcttaacaagcttgctgctgcttcgtctacgatgattgtcacgtcgtcgtgtagttgtaatgcacttgctgggacgtctgttgtttgtgggccttctactgtgcctttgatggcttcggcttttgatttgccatatgcgaacaagacgattttcttagcttttaagattgagccaatccccattgagattgcttttgttggtacatctgcttcattttcgaagaaacgtgcgttagctttgattgttgattctgttaactgcacttcttgtgtattgctgtcaaacgcagcaccgggttcattgaagccgatgtgaccgttttggccaatccctaagatttggatatcaactgggttatcagcaatcacttggtcatagcgttttaattcagcagaaatgtcgcttgctaagccgtttggtaagtatgatttagtaaatggtttcttgtcgaataagttcttcttcatgaaatagtggtaactttggtcgtcatcagctgataagccaacatattcgtccaagttcacggatgtgcaacctgtgaaatctaagtcgctagccactaatgtttcgtagaatttaattggtgaactaccagttgccaaaccgaatactttagcgttgtttgctaaaccttctttgaagatttcaaagcttttttggccgccttctacttgatctttcactttaataattttcatcatgattatctcctcatcatttaaaaattcaagtcgtttattggtatagtccaattataaacggctaaaatttcaattgcaagccttttgacgctaaaaaacgcgctaaataattggtatacctaacgtttagcgttttcacggcatttcgttaaaagcttacttttaatcgctagcaaacgcccccctttttgtgtctgctgattcaaattggttaaccaattgcactatattcattgattgccgtgcatttctggatatttttcatttgtcttacaaatccgaaatcgggtatgataatgcgctgaactattatataatatgggacagtatgagaaaaaaggtggcgttattatttgaatgatccaaagcaccgttccagtcgatggcgagcactgctcaagtcgagcagacaaaaggtctcaacgctattgacatctgctaaagacagactcgcacatttgctccatttacccgataaacgttctgcacaaccaactaaggaacaaaaaagagcctacatccaagagttgagccaatcaccactctcttttaagattaacgtcttctttgaagccattaagagtatctttctctatgggatctcaattggcttaatctgtatggcgctcgctgctggaattggcgcgggctattttgctgcgttaatgaaatccgaaccaattcctaggtatcaagtgctaaagcaacaacttgataataccgatcaagcagccggtttatactttgccaagaacaataagttcggcgcaatcaaaaccgacttaattcggactcccatcaacatccatgagatatccccttatctaaaggatgcgattgttgcaaccgaagatgaggatttctataaacacgatggggttgtccccaaagcactcttgcgggccgttatttccgatgtcactgggtttggttcacaaaccggtggctcgactttaacgcaacaattgattaagatgcaggttttaacctcccaagtaacctttaaacggaaagcaaccgaagtcttgctcgccttgcgggtcgataagtatttcactaaaaaagaaatcttacaagactacttaaacgttgccactcttggccgtaacaataaaggacaaaatatcgctggtgttcaagaagcagcattgggcctattcggcaaaaatgctaaggatctttctctagccgaggctgcctacattgctggtctgccacagagtccttccgtctatacaccatatgatcaagacggcacccttaaagatcctgaatacttaaaatatggtctagatcgtaaaaataccgtgttattccggatgtatcgtgacgatcgcattacaaaggctgaatacaaagccgctaagaaagtcgacttaaccaaagaattccaaccaaaagccgatccagccgaaacaacgaagagttatggctatgtttataacttacttgaaacacaagcaactgatattatggccaaacagttagccaaagaagccaatgtttcaactgccaaacttaacaaagatccaaatctctacaaacaatatgaaacacaagcaactgaattactcagcactaaaggctatcaaattcacagtactatcgatcaagaaatttacgatgccatgcaaggggttgttcaccaacagggcgcaacattcggacggacttataccgataccgttactgacgaagaaacggggttacaaaagaccgtttcgtcccctgttcaaaacgggagcgtcttgttagataaccgcactgggaaagtgatttcttttgtcggcggacgtgatttctccctcaaacaaacaaactacatgttgaccaaacgttctcctggttcaactatcaagccattgttagtctatggtccagcaatcgatcagaaactgattggttctaaaacgatgttggccgatttcaagaccaacttcaaggattacgcaccaaccgattacggtggcacgatccagaacaaattcattccagctgacgaagcgttagcccagtcattgaatattccaaccgttaacctttataacgctttgaagaacacaacagatccttctaagtacatgagtaagatgggcatcaacctcaccgctgatgaatacagtcaactggggatttcacttggtgggaccagtgatggggtcagcgtcttagaacaggccagtgcattttcaaccttcgcggatcaaggtgaacataccgacgcctacgtgattgaaaagattacggatcccgccggtaatgtcgtttaccaacatcacgctaagaagaaacgcgtcttttcaaaagcaacatcgtacatcatgaaccaaatgttagccggcgttttaacagatgggactgctacttcaatttacgatcaactctactttaataccaacaacttagttgggaaaaccgggacttcaaatgataaccgcgatatctggtttatcgggagtacccctgggatcaccctcgcttcatggatgggttatgacagtactggtcgtaacttaactgacaactcaagccagattaatgaaagatactggtcaaaattggccaacagcgtttatcagatcaacccaagcctcatgcgtttggaagatgatcatgaaaagccaagtacggtcacaagcagcaaagtcttgaaattaactggtcaattacctggcacggtttcaatcaacggcagctcacagaacttgaacggttcaaccgtcacctcgctttataataactggacgccaaaagcaactagctatgaattcgggattggcggttctgcccggaactacgaaactttctggaaccactatttaggttataacaacggctatggttcaattacctatagcaccgctgatgaattaaatccaactagtggctacagtagtcgtcgcagtggcaccgcagcaacaacgacaaataattacacagcaaacacaactggtactgctgctacgactggcactacaaccggtacgaattatacagcgaataccaatccaacagatacagagacaacgaactaaactaaaaaaaggcctcagttctaacgatttaaaatcgtttggaactgaggccttttttgattggtggaaacgtgctcttgtttgcaataacttccgcttaatctaaaaatcccgttaatcctaaaacctggattaacgggatttttttattaatgctcaattgttgaccgcaaccaatagcactctattttgttgattctcttgctacgatactgtatggcaataggattgtcttgtcgtttacgtcttctttgttcatcatctttgttaaaagccgcattgctacggcacccatatcatacaatggttgtgagattgacgtcatcttaggacgtaccatttcagttaacttcgtgttgttacttgtcacaacttcgaattcagctgggatttgaacgccggcatcaactgccccgttcaagacaccaactgccaattcgtcatcactgacaacagcagctgttgccccagttgttttgattttgctgaacaatgcttcaccagcactgtagctgtattctgtttcaaaaattaaactttcgtcataagcaatgcctgcttcattcaaggcatccttgtaaccgcataaacgatacttgctgttaattgggaatttcaagctaccacaaacgaacgccactttgtcatgaccatttttgattaacttcaaagttgcatctttaacagcggcaacgtaatcgatgttaacactacccacttgttcgtctggatcaattgaaccagctaacacgattggtgtctttgaacgtgagaattcagcgcggatttcgtctgaaatactgtggcccatgtagattaaaccgtcaacttgttttgccaataaggtattcaacacttgaacttccttttggttgttttcatctgagttagccaaaataatgttgtacttgtacattgtcgcaacatcgtcaatcccacgagcaagtgatgcaaaatagatgtcactaacgtcgggaatgatgaccccaaccgttgttgtcttcttgcttgctaatccacgggccaccgcatttggacggtagtcaagacggttaataacttcaagaaccttcttacgtgttgcgggtttcacattcgggttaccattgacaactcgtgagacagttgccattgaaacgtcggcttcgcgcgcaacgtcataaattgtaattgtttgtttttccatgattaactgattcctttcatttgtaaaataaaatagattatattttcagcagttttcattttacttcttgattaatttaacagagatttaaagcaaatgcaagcggtttacactaattttcatgaaatttacatttttgttttcatttgtggtttacattaccgtttacattggttgtgatatactagtgatatcaattgtaaaggaagtgctttagatgaataatcaattagcccaattacaaaattggcttggtgagaataatatggatgtggcttacatcagtaatccaaccaacatcctctatttcactggtttcgaaagtgatcctgcagaacgggtcttagccctctttgtttttgcagatcaggacccattcctatttacaccacaattagaagttgaatctgctaaaaaagctggctggaaactcgacgtttacggctatctcgatcacgaagatccatacgcaatcatcgcagatcaaatcaagaaacggaatgcgaaccctacacgttgggcacttgaaaaagacgaccttcctgttcaacgttacgaagccattctaaagcaattcccagacgcaacattcccaggcgacgcttcacgtttcatggaaaacttaaaattaattaaaacacctgaagaaatcgctttaatggaagcagccggccgtgaagccgattatgctttcgaagttggtttcaatgccttaaaagcaggtaaaacagaacaagatatcgttgcagaaatcgaatacgcattaatgcgcaaaggcgttatgcatatgagttttgataccatcgtacaatcaggtatcaacgcagctaacccccatggtggccccgaagccaacattttaaccccagatgccctcgtgctctttgaccttgggacattgcataagggttacatgagtgatgcgacgcggaccgttgcttttggcaaacccgatgcgaaatcactcgaaatccacaaagtctgtcttgaagcaaacttaactgcccaagcagcaatcaaacccggtatcacagcggctgaattagataagattgcacgtgacgtcatcactaaagcgggctacggcgaatacttcatccaccgtctaggtcacggcattggaacttcagaacacgaattcccatcaatcatggaaggcaacgacatgattatcaagccaggcatgtgtttctcaatcgaaccaggaatctacatcccaggcgttgccggtgttcgaattgaagactgtgtccacgtaacagaaacaggatcagaagccttcacacacatgacaaaagaactacaaacattctaagagtgctgattcaaacgggttggctttgaggattaacttaaaaacgcggattatgacgcttttcgtcatgattcgcgttttttggttaaccggaaaaggcagtttgaaacagcacgtttcaataagagtgcccttaattgcggtcagcaactgagcactaattaaaaaaggcagacgaaatcacaaaatgatttcgcctgccttttgttttaaagaactttataatccctagtcgttaaccattcaaactatgttacagtaatcctaacagtaagtttatgacggtggctaacgctcagaaatgaggtgatgcctatgttgattaagcgttaccttgagaaaggataacatgtcggttttcaacgcactgatgttggcaatttcggttgccatgttagttattgagattctgaaatttaatcaaaaaaaataaccgtctaaactttgacgagtcacggttattttttaccaaaaacttgccaccgtcttaagcggactgtggagaagagtcgtgttgtcgcacggctctttttctatgttttcattataacaccgacttttaaaatttgcactagtcgtcaattcaaacaagcaaaaaagcccccgctaaatcaggcttggcaggggctttttcattgattatttatcgtcagtgacttcttcttgaatagtttcaacagcggcggatgcttcgtctttggcttggccaaatgcactcttgccgtcgatcacgatatcgtcgaaatcttcttggctagcttcaaggctgccgccaaattgtgatttcaagtctgctgttttttcatcaaattgtgcttttgcttgttctttgatatcagacgcattgtcttgccaatcacttgcataatcatggacgcgattcatgtgtagctttgcgtcgtcttttaagtctgctgctgtttcacttgctaaatagtagtagtcttgtgcgcgatccattaaatcatcacctaagtccactaattttgattgtaattccttacccgtcttaggagttaacattaatgttgcaccaatggctgctgcgccaccgactaatacacctaatagaaaatgtcctttttttgccatgagaattactccttatcctttgtttgacgtcgattttggtaaaatcttaatgcacttgcgccaaccttcgaagcgaccgttgccttagcggttgtccgcccaacgttggtaacatgttccgttaaattgcgacttgccgtattcaaacttgaaacgctctcgccaagttcgccagccgctctgaaaacaggatccaagtcagcgactttcccgttcacatcgtctagcaatacgttggctttgctgagtaaaccttctacttctttagataaaatatcaacattctcagtaacaaccgtgacactcttgttggcttccgttactgtcttagaaacatccgttaatacttttgtgacttttaatagcatcactattagaaaaacaactaggaccgcaaaagcccctgcggcgattagcgccgcaatttgaccacccgtcattgatttgttcctcctacttcgttatctattacattgcctcttaaagactagaatagcattatttcccttaaccttcaattatcttcactatattaggtgccattttttctgacatttgctaaactaaagacatgctacaaaaaaggagtttcacgcatgttcacacgtttattagcggccgcaccaactccggtcgaatctgttcagaaacagaccaatatttttatgcgctacatcacttcaattgactgggataaattactcagcaccctcgttgctggattgtttcaaattatcctactctccgctttattctacctcatcaatcgcttaggtaaatacatcattaagcgcagcttcagaaaataccgcaaaactgatggtttctcaagtaaccgcatgaacaccatttatactttgatggtcaacgctttttcatacctcgtgattttcttctatctctatgcgctactcagcgttctcggcgttcctgttggtaccttgattgccggcgctgggatcttcagtttagccattgggttaggcgcacaaggtttcgtcaacgacatcgttaccggttttttcatcctcgcagaacaacaattcgatgtgggtgatatggttaaaattggtacggtagaaggcaccgtcaacgcgattggcttacgaaccacacaagttcaaagttacgatggcaccttaaatttcattcctaaccgcaatatctcgatcgtcagcaacctatcccgcaatgatatgcgtgttctgattaacattcgcatcttacccgacaccgacttacaactgttagcggcaaccgtcaatgaagtcaatgtgcaactggtgcccaaacatcctgaaatacaagatggccctacgattctcggggtaaccaccctcgcagatggtgtccttgcttaccagattgttatgcacaccactaacggcgaacaagctgccactaaccgtactttcttacaggcttacttgcaagccttgaatgaagctggtgtcccattaccttcaacacccgttacaattcccaccaaataaaagtcccctcatataaaaaggagaaccgcttatgccacttattaacgcactcaaaggcgccctaatcggcgtcgcactcgtaatacctggtctatccggcagcattttcgccgttatcgttggtctatacgaaccgcttctggcggctatcgcgcaattcaaaaaagattggcgccaagcaattggctttttatggccaatcgggattggcgctgggatcggcgtcttactctccaccaaaatcattctttggttatgcaccgcttatccactagcggcatacagtttcttcatcggtcttgtcgtcggcagtctcccattcatctggcgtagactcgccggactcaactggcaaaaagtgttaatcgccatcgtctgtggcgcaattatgctactactcacccagattggtggtcaccaatctgaatccgacatcgctatcaaacaactcactaccctccaagactttggcacgttactatttgccggcttcttctcagtatcactcatgctcatcccaggcgtctctgggtcaatcatgctcatgattgtgaagcaatatggcactgtttatcacgctgtcagtcaactactcgacttaatggtctacctcgtcacaggacgcttgacacaagccacagaagcgttcaaaagcgtcgcgctcctcttaccgttcatcattggggccgtcatcggaactgtgattgttgctaaattaatgcactacctattagcacacttcgtcgaatacgtttacgccggtgtgctcggcgttgtcattgccgccatctggattcttgcccaaaccggcgtcgcaccagcctggccagccctaacaaccgccacagcactactaggacccatcgcactcatcatcgctatgatcatcctaggcacaatcgcaacaatctacttcgacaaagcatagagtgctgttaaagcgatttgcctctgagtattaattaaaaatgagcctcaatctcgtcttttgagattaaggctcattttagattaagcggaaggtgttgcaattaaaaagcacgtttccacaaaaaaactatccacacccttcccaatcaggttgtggatagtttttatttattatagtgctttaatcgctctaagatgttcaaatttttataaatattttctgaatatttattcaatctcgtttgacccgttatttcgttagcgatgagcttttctctcgctgacaacatagaatactataccaacatctaaatctatcgtcaagtaaaatttgcataaaattcatcttttttctaaatattcaaacaacttagttatttgcaagctttgcttggcattctggacagataccatgcacttccattcggtgcccagttaccataaaccccgttagattctcagcaatcacttctacatcatctaactccggataaaaaacatcaactacttttccacagttctcacaaatagcgtgataatgcttggtctgcgcaaaatcaaaatgactggatgcatctccataagccatttcttcaataatccctaatgaggtaaacagacgcaagttattatagattgtcgcaacactcatattcggaaagcgccctgctagcgccttatagacatcgtctgcagtcggatgcatatgagtgccaatcatgaattccaaaacagcttgccgctgtggcgtgatccgtacgttgtgttctttgagtttccgtaacgtttgttgcacgatgtgactcattttgccaccacctttcgctaatgataatcattatcatatatccttattgctgtaatcgtacctttttttgacgagactgacaagtatctttgctcaaaaaaagacgttacgcgagtcccgtaacgtctttacatactttacttcaattcaggtgcatccgtctcataaaggtccattgttgacttaccattattttgctggataacactcgttttgttgttactgtctttcaacttagctttagcatctttcaccttgtagctaatcttagacttatctggtttttcgaatccttgtggtgtatagaatcgaagtagatcgccggtgattaccttgtcagaaagtgacaattcttccgttacatgttcactgattgccgttaattgcttcttctgcgctgccgttaaattcgtcagcgtcttcccattagtcgtatcgtaataggtgctgcctaccttcgtatactgtggtgtgacaaagtccccatttctaaagacaaccgtctgattgcggttaggcgcaagtaaatccgaaccaaattggatggtatcgtcattttttacacctaataggttcaataaggttggtaaaacgtcaatttcaccaccataggtatggttaacgccaccttttaacccatccatatgcaccatgaacggtactttttggaattgcgcattatcaaaatcagtaaatttatcctgattcaataacttcgcaacagccttcttatggttccctgaaatcccataatgatcgccatatagaacgagcatactattcttatctaagccagtcttttgtaaccaagctaagaattcaccaattgattgatccaaatacttagcggtttgcacataaccatcaactgtatcatcaccagtatcggtcttagcaattgattgattttgtttatccaataagtatggatagtgatttgtcacggtgattaatttagcatagaacggttgtggtaattgttcaatgtattgggctgagtcttgcatgaagatcttatctttcaagccataacccacgttgtagcctttaccttctttaaagtattgagaactgaagaagtaatcatagccccatgacttgtaggtattatcccgattccagaaacttggcacatccccatggaatgaagcggttgtgtaaccttgttgatctagaattgatggtgctgcttggaaggtattggttgtcccttgagtgaccatggcggccccttcaggtaacccgaacaatgagttttcgagcattaattcagcatcagccgtcttaccttgaccaacttggttaaagaaattgtcgaaactgagggtgttttggtcgtgatatagcttattgatatttggtgtgacttcttgaccgtcccacttataatcaattaaaaattgttggaaactctctaaatggataacaaagacgttcttacccttagccacgccagtgtattcaacattgggtgcaacccggttgtccttcatatacttcaagacactactcatactactactatcagcattagccttaatcgcattattcttggtcgtcttcacgccatcatagacagtgtatgcattcatcccaagatacttaatgatgtagttgttatcgaacgtccgggttaataacccagaacgatctgcttctgcaatcccgaggttggcaccgaataacacaacagctaacccagtaattgcaaatgcattccgcttcataaagacacggtgatcaatcttcactaacttagtagccaataagatgattagcaataaaacatcagcgaaaactaggaaatcagaatattcaataatcccagcaatactcttgcccaagttatttgataccgcaccagaacccttcattaagttaaacgttaagaagtctgaaaattcacggtaatacaaaatattcgagaataaccaagttgaggttattaaatcaataataatcaacgtaatgtatgactttcggccattcataaacaaggcaatcccaaatagcaataaggttgttggaatgggattaatcgtcattaagaaggcctgcatgccacctttgacgcctaagttaaattttgtttgatatgcgtaaattgttttaagccagaatagcgcaactgcgaaaaggaagaatccccatcgtgtgcttaatcctgattgaattttatgaccaatttgtttcatcgatacagtagcctccgttaaaggtcgttgggctttaaaagccgttgacaatctgaaagttagtttacacatccgtgaaatgaaaagcaatatgtaaccggcttgaatgccaaatattaaaccatttttaataatctgagtcgcaactgagcaaggctatcacctgcttaagtagcaaaaaaaccatcaagtaattcgatactcaatggttaattaactagtctgctaataaatcgtatagttccattgcaactaaatcaatattgtcaaattggaattgttgatgtgtgttgctgtcttcaagttcaaatgcttgagcttgaggatcatagctaacagttgcttttaaatcgccgtccttttcaaaacgtctttcttgaacctcagcgctttgatcttcttgcattgctaccagacgtttgataatcgcaactaactgtgatgattgcatggcgaagcctcctttaataactaactatcagtttatcagaaaaagagcacttctgcaccgtttatatccaattattttgcagaaggccaccataatttaattaaagcttgggtgccatcgtcgcctaattgtttatcattaacgagctgcgcatagagtttcttagcttgaagcgtagctggtaaatggagccccatcttttcggattccgttaatgcaatctttaaatccttcaaaaaatgttttgcgaaaaagcctggtgtatagtcttgcgctagaatacgtggaccatagtttgcaaggctccagttctgagcactcccaccattaaccgtgtttaaaaccgcttctagttctaatccggctgctttagcatacactaacatctctgtcattccggtcattgtgccagcaatcatgatttgattggccatctttgtatgttggcctgtcccggcagcaccgaagcgatggacagtcttacccattgcttcaaaaaagggtaatgccgtttcataggcagcttgatcgccaccgaccataatcgtcaacgtcccgttttgggcgccgatatcgccaccagaaacaggcgcatctaatgcttgcagacctttgtcagctgctgttttggcaattctctgcgccaatgttggcgtgctggtcgtcatatccaccaaaatctgaccaggttgtgcagcactaaaaattccgtcttcaccataatagatggcttcgacatcttgcggataaccgacgattgataacacaatctgactttgcgcgacaaccgctgctggtgaatcagcccatgttgcaccgagtgccacaactgcatccgctttttgttttgtccggttatacacgacaactggatagtctgccttcaataaattcttgaccatgctactacccatgacacctgttccaatgaagccaattgttggttgcatcaaaaacgcctcctactttttatcagttactcgtggtttaactgctaacgccccaatccccatgaacatcccgagatagtacgtaaacaatcgccagagcaacatgcctaacaccagtttacttgaactcgggataaaagtggcaaataacgtcttaaaactatattctgccccaccagaaccgcctggaactggaaagagcgagacaatcatgacaatcatgatgtgtaagaccatcacctctaaataattaacatgcgggatgccaagtgccaataagacaaagtatggcacactataatagaaaaaaagttgcccaagggttaaaatacagcccttgattagtttctttttctcgcgtttaaggtgtagactctccgcgtaaaaggtatcgattttggccattaacatggtccgccattccgtcacccgtttttgggagacgaaccagcccaccggaattaataaccagtgcactaactgtttcgtaaatcgattgtaatacatgattagcaacaatacggctaacacaaccacatgcacgattaatccgaaagtaatcaaaatcgacagcgtcccaaaatgcttggaaacttgcgagaaaccgatcatcatacttaataagaaattcaccagtaccatgaattggtaaacaataaacttcatcagcagtactgagctagcttgcccagcttctacacgggattgcatcaacgctaccagttgtgccggttgtccacctgaagaaaacggtgtaatcgcattgaatagttgtgcaatcaacggaatccgaagcgcattgtataaagaaaagtgttctgtgcggtcttttagaaagacgcgtaagacaagtgcctcgaaaaaccacgaaattaacatacataataaggcgaccaacagccaccaaagtttcagatgactaatatcgataaacagctgtttcaacgccagcgtgcgactttcataggcaaaaatcccacacccaatcaacagcatgactgcaaaaacaatcttattcgttctactcataaacgaccctttttcttgttattagcaacgatatgaaaaaactgttgattatatgatcaacagttttccgccagcgcgacttattttttagtatctaaatcttctaattccaataaatcatcttggtctaactttaattcgtcatataatagctgtgattgcttatagaaatgaatcatctgttccgcaaagtaatccgccgaaatagcatgcaacttctttcggcgcggtgctggatcatcaaatgcatgtggatgattcaaataattcgatacttgatggatcatttcatcttcgttcgtaaatgtcgtcccaattgaaggatcagttaataactcagccgcatatggacttgtcatgacgacaatcttgagttcagcggccatcgcttcaatataagttaatccttgtgattcagagtcactggcggagacaaaaagattcgccatatgataataatttgcaacttcatcgttatcaaccattccagtgaaaatcacgtggtcggtcatgtttaacttggcaacctgagcttctaaatcttctcgagctggaccttcaccaacaatcactaacattaaatctggtgtttgggcgactagtttgggtaacgcatcaactaagatatcaatccgtttttcataagcaacgcgactcaatgataagagcacaggttgttctggcgtcaagcccaattcggcccgtatgtcgcgggtcacttcgcgctcaaagcgactaatatcgaccccggtcggaataatccggatgggggccttcacttgatagccatttaaggtttgagaaacccgctctgatggtgccacgatgcctgacatgtgatataaaaaggcctttgtcatttgcttaacatggtatggccgtaataacttcccgtttaaaacatagtgtaaataatcctcgtacatcgtatgatacgtatgtaaacaaggaatttttaaatttttagcgacaaacttcccgatgtagcccatcgaaaattcggtctgggtatgcacgatatcgagatccaattccttagccacttgataagcgtgaaataagccgcgcacagcaattcgccgatccgtaaatgagacaaacgggacactagcaaaccggaaaatattcggttcgactgcatctttgtcaacatgtggatcggtcgttgtaaatatgtagaccgaatgcccttgtttttctagggcttcttttaatgttttaatggaggttgccacaccactgacttgtggaaagtaggtgtccgtaaatatcccaatattcaattggtttcctcctccttatctttggacatttgatttcattataataattacatcgcctagatgcaatcaatgtcactaattgtaatctattcatactagcataaaaaccgtctttagacctaaaaaacagccaatttacgttaaaaaacgggcactgcacagtttttgtgcggcgcccgtttttttattttagcgtaaccaatacgtaattgagaagattattaaacaccaaatcggtaatgccactaacaggccgttgcgaatacccataaaaaatttcatcatcccacctcatttcataaaccaatacgaacagcttgctatttagggtcactgtctactatgataaaggtaagtttaggcttcatttattaagaactaccgtgcttttacttaagaatgattaaaggagcaaacgatgcaaacttatctcattaaaaaacctcaaaaactcgaattaacctatgacgaaaatatcctaacaattcactatcccggactgtttaagaagaaacaaaaccaggatcgtgacattccgtttagcaaattaaaatcagtccgcttttttgaagcgacttatcggcatggtcatctccaaattctctaccaaaaacccaaccacgccctcgaaaaaatcgtcatcagtttcgaacccgacgataacctcgctgtgcgcaagttatacacagccttagcggactatctcgaaaaaccaaccgttgaagaagacctcagttatgttaagaccggtgatcttatcatggcttacctcaaaatgcgcgacgacggcctaatgacccacgaagaattcgaagaaaaaaagaaaagaatactaggaatggaatagagtgcgcagtaagcccgtttatcttctgaggattagcttaatcaggcggattgccgacaaagtcggtgatttgactgatgtcgctaaccggaagaagatggcttacggagcacgtttcaaagtagagtgcgacggcagacgattatacgctgaggattagcctaattcaccacaaaaaaaagggccaacgacaaacatgtttgtcgttggccctttttttaatcctcgcgagatactgagctaataaaccactctttatttctttataaaaccaattgccatcccgatgattaagatgaccaacacaataaccgtaatccaaacgtagaggtaatccacttctttagcaaatgcgtagattgataccaccacacgcaagactggcgttaaaatgaggcagaataagcccaacataatcacagcgccagccttaaatgcagcaatgccactgaaaatttcggtaaaggtcgttggaaattgatattctgaataacctgtaccgccatgaataatcgcaagtaacatgccaataatgagcagcgttgctgaaaccgccaccccaatgcgtaaaattttaccgatgacgagttcaatttgagccatctctgcttttttatctatcattaaatatgcaccccgaatcctttaagcaccatttgtaaacctgtgtataacaaaatggggataaaaatcatgcgaatcacacgtggttgcaaatactgcataatccgtgaacccacagtggaacctaccaaaattccgattgctaacggtgcagcaacgctgggaataatcgcaccgctgaagaaataaacagtggccgaagctgctgccgtaacccccatcatcaaattactcgtggcacttgatggtttcaatggcatcttcataatcgtatccatggcggtcactttgaataccccactcccgataccgagcaagccagaagcaatgccggccccgaacatcatggcaaagccgcctggtacttgttcaacagcgtagtcgacttgttcttggttggccttatcgtagtaagtgccatttaagttcaacttcttggcccacttatcttcaccagcgccgacgtgttgttctgcaactttaccacgtaatttttgaatcatgttgtacgttgaaaatagcaagaatgcgccgaataagatgaataagaatccagttggtacgatgccggtcaataacgccccgataatcgccccgacggtcgttgctatttctaggaacatcgccactcgtaagttgagcatatcatctttcaaataggcgatagttgcaccagaacttgttgcaatcacggcaataatgctggccccaatcgcgtatttaatatctaagccaatcgctagcgttaatacgggggttacaatgatcccgccaccaatccctaagattgaacccaacacgccggctaaaacaccgacggcaagtaataaaataatttgttgcatctcttttctcctcttaatgcatttttataaccgtttttcgcctgttagtgcacggagttccgttaaatcctgactgacttctaaacagcctaagtattgtccctgtggatcacgaaccgcaaaatagcgaatatagacgaacatcccgcggaagttcaaccaaaaatcagcatggtcttctcgccccgcatgaaagtccgctaaaattttctcaaccttatccacactctttggtggatggcagttcacaaccgcgcggccaatcactgcccgggttcttgggaaaatacgatgctcgttatctgagaaccactgcacaatatcgttttgatcgacaaaggttaaatcaagcggtagtacttggagaatcgccgtcaattcactaatattcatcgacccagatggtagaacgattttagcttggttatccacgccaatttcgatatggggttgtggtgcttctcgacgtgcttgaacctccgcttttggtgccgcttctttttcgtcagctaacattgccttcacaaaatcaggcatttctggttttccttcatctttttcagcgggggcttttggtacaggttgcccctgaatttcaaacggaatattagtcgctgctgctatcgaagaggggcccggttctggtggcgttgtttgggtcatcatttgcgcatccgccaacgattgcgccatcgcattcagttcttgcgcaatcttcggcacggtccgcttttcggccgccgcgatagcttcagcacttggttgccatggtaatgggtctggaattaaggtatacccgattggttggctttcagaagcaattagtccccagtcagctggtgtaaagacttcattaaccatcggaatcatgatttcttcttctttgaaaatcatttcttgaatttctttgctcatcttttcaacggctgcttcaattgcatatttatccggaattggttccgcagttaccatttgataggccgtcttcaccaacccccgaatttgatcatccacaccccacatcactttgggtggtgcagtaattccatattgatccatcaacggaaaaattaagttttctttccgtaaatagtggcggtcgatcaactgtaaatcttttaacgcttgttgcatccgcacgagataattttgatcagtccctgactgctgccatttcttcaaacatggcagtaattcatcatttaagagcgagttcatgaccaaattttctaatttcatcacagcgactgggtgtcctggctgttcttgttccggcgtttcagccccgtttgaattaatcgcccccttgaaaaccgcagcatggacattacacaaatgttgaatctccatcgggttcaagccactggcaatcaattcccgttcagcagacgtaatttcagacacatcaaccccagagaaggactcatcaaaaatccgcttagcctcttcaaacgagccaccttcatgcagcatttttaagatttccacgattcgtttttggcggtacgcactgctatgctgttgctcacacatcagctaacacctcgaatccttgtgcttctagactagcgataatcgtcgtcaaaggaatttgcttcatcttagcccctttaggcaatgtcataaaacgccccgcagtattcaaaagcgctgggttcgtgaccccatcaagtccgatttcaacaagcactggcaccacttcaggataggccgttaccaattcataaacggtttgacttaatttaatttgttttgccatcataatctccttagtcagcgttatttttcaatccagccaccatcaattggaacgacggtaccatgaatgtaatccgcaacctcactcgccaagtaaacacttaagttcgcaacttcagttggttgcgcccaacgccccgctggtgtctgacgggcaacttcttgtgccatctcaccagtccccgcaaaatcggctgcgttcatcggcgtctcaatcgcacctggggcgatacagttggcgcgaatccctttagcggcgtaatcataatcaagctgctttgtatagccaatgatggcgtgtttcgatgccgtataagccgcaccaccgccaccagcaactagcccagcaatcgaagccatattaacgaataccccacgcttttgcgcaaccattgttggcaagatcgcatttgttacaagatattgactttttaaattcgttgccataattcgatcccaatccgcactactggtatcaagcgttggtgcataagcatccaacacgcctgccgtgttgcagaccacatcgattgggccatgttctgccagcaaagtcgctaatgtcattgttaattgcgtttcatcacaaacatcaacctgcgctgtgatgcaccgactatcaacagggacttcaatcggctggcgatcaagtgctaacaccaatgccccctctgctaaaaaagcggccacttgagcgcgcccaattcccgatgccgccccggtaattaaaatggttttagtcgctaaatctgcaaaatgccccattagtcgaccaattgccaatcatcagccaatacatcacacgatgttggttggaacattgagtatgctggtgtttcggttgttttaattaataggtagggactaattgcttgcccctcgaatgtcccatcggccacttggaaaataaataattctggaccatcccagccagtccgtactacttttttgccagccttaattgcattaatcgcttcatcaaatcccatgatcattacctcatttaacttaattttttaaaatgttgaacaatcaaccttatatgatattctagcacgccactcaaatcggtaccaattaaaatcacaggcaattcgattcaaaaaaggtgtgaccaatattggtcacaccttcctgaagttaatttgatttgcgtttaaacacacgcttaatcacatcccagacccctagtgattgaactaagcgttctgcgggcacatactcgcgaatggcgcggagcacttttttgggttcctttgaagcaaaagtatacgtcccatttttctttgtttggatagcatagcggggaatccacttgcctttgaacatgactgatgcaatcacatagtcaacttcttcccatggaatttgaataaattgtcgtgcgtcacgatcattgaaaaattcaaaccctctatccccgatcatgatttgtccataatcagagagtgctgtaaacgacgtggctttaatcactaagtccacctttgtattaatcgattgaaccataatatcgactccatttccaaaaacttactttcattatacgcttttataaaaaggaggggctaggacaaattgactttgtcctagcccctcctttgttttctaaacgtgcttcagtaggcatattcctgcggttaaccaaatttgccaaatcaccgactttgttggtaattcgcctgattaggctaatcctcagaagatacccagcttattgcgcactcttttacattaagtgtaatagatggaagacaattccgactacgaataagccaagaataatcacgattggtgagactttcttcttaagtaaccacatacagaataatgttaatcctaatgcagctaacccaggaatcaagctgtccaagttgtcttgcaacgttgtcactttatggcttgtcaatgacaaaccttgagcttgttgttgtaaggctgattggatacccttagcaccgctaggtaatttatcccagtcgatgaatgcgcctttgtccaacttaacagatgaaacaactggcgtaaacttgacagatacccaacggttaaccaacgaccctaagatgaacatcccaaggattgaagcaccctttgtgatgtcttgcaaaataccaccagataaatcttctgtaatctttgaaccagcacggtagccgaattcttgtgtataccacatgaatgacatccggatagcattccaagcgataaagtaaatgattgggccaagaatgttaccactcatagcaagtgaagcagccaaagcaccgatgattggtttaacagtgaaccagaatacgggatcgccgataccagccaaaggtcccatcatcccaactttaaccccttgaattgtaacatcatcaattggtgcaccattagcacgttcttcttcaagtgccaaagttaccccgatgattggtgaagcaacataaggatgagtattaaagaattccatgtgacgaactaaagcagctgcccggtcttcttttgttttgtataatttcttaattgctgggattaatgagtaagcccaaccaccattttgcatacgttcgtagttccaagaaccttgaaggaaagttgaacgtagccaaacagaaatacgatctttacgcgttaattttaattgttctgccataattgttagcctccttcttagtagttgtcgataatatcgccaagtgggtcaccagtatttgaaccgccgccattacctgagccgccttgttttgaaagggctaagtataatagggcaagtgaaacaccgattgcaccaaggccgataagtgtcaattgtgagatagtagcaagtacgaaaccaattgcgaagaatggccatacttctttagttgccatcatgttgataaccattgcgtaaccaacggcaacgaccatcccaccaccgattgctaaaccgtctgttaaccagattggcattgctgtcaacatttctttaacagggccagcaccgattgctaagattaagcctgcaggaatagcgattcgtaaaccttgcatgataatagcgatatattgccacatttcgatcttacggaagttaccttctttagcagcagcatccatgatgtgcacgataccagttgctaatgtccgtacgatgattgttaataataacccggctacggcaagaggaacagcgatagcgatagctgatgtaacgccggcttttccttggccaccaagtattaaaataattgcagatgcgattgatgccaaagcagcatcgggtgcaacagcggcaccaatgttagcccaacctaaggcgatcatttgtaatgtcccacctaagataagacaaggtagtaattgaccggttacaagaccgattagtgtacaagcaataactggctgatggaaatggaattgatctaagataccttccataccagctagaaatgcgataaaaatgaccaaaatcacttgaatgaaattcaaatccatgattattaatcctccaatttcttctgatgttatttgttattttgtttgtctagttctgcttgtgcttttttaaggatactatccatgttaccgtttgagtcacttggcactttacgaacatcgaacttgatgcccttagcttttagtttttcaaaggtatcaatatcatcttggtcaaaagccaaaacagtatttggttgcactttaccagttgagtgcgccattgaaccaacgttaattgtttctaatggaacgccaccttcaactgctctaagtgcatcttgtggtgattcaaataataacaaagcacgttccttaccaaagtgttggtcatcttttgccaatttaatcatttgatcaactggcacgacgtgtgctttgatgccactaggagcagcttgtttaattaagtttgtccgtaattcatctttagcaacgttatctgaaacaacgataatccgtgttgggttagttgtcttcgaccatgtcgttgcaacttgaccatgtaataaacgtgaatcaattcgtgccaagacatatttgaacttaccaggtgtgcctgagtttgaagtcgtttgtgcggcttctgccttaggtgcttcttctggttgtagttcttcaggtttaacccgtacccctgctttagcttcatcaatgatatgtgctgcgatttcatgagcagatgtcatagataaacgagatgcgtaagcttcaatcaacattggtaagtttaatcctgtaacgattgcccacttatctttatgtgcttcgaacaacccattagcttgattaaatggtgaacctccccaaagatcaactaagaataagacgtcatcatctgcatcaaacgttgcaacggcagcttctaaatgcgctttcaaatcatctggtccttcatttggcataaaagtaacagcttgtactttttcttgttcgccaaaaatcattgagccagattgcatgattcctttagcaaactccccgtgacttgcaataacgattccaaccattcacaaaaacctccttaataaaaatagttgtcatactcatcaataaaacgctatcaattaatataaaaaaataatggcttaaacattattgactgagttaacagttccacgtttttattttttaaaacgctttactgaattaattttaccacaaaattctaatctgtctaatcatttttagattatctgcgaaattggtctagataatcgacaaaaaagcgctaaaagtcgcattacttaagcttttataattagataccgctaatgtttgcggtgtgctaaaatcgttttttatacaaaaaagaccttaaatcgattgatttaaggtctttgctttatttaagttcattgccactcatatattgttgatgtttttgttcatcaaattcattctctgacttggcaataatgactgctgctaatgaatttcccattacgttaacggcagttcgtcccatatctacaatccgatcaatccccgcaatgaaggccacaccagcagccggaacgccgattgtggtgattgttgctaataagacaacgaatgaagcacccgggaccccagccatccctttagaggtaatcatcaagaccaccaatagcgtaatttgttgggtgagacttaaatgaatgtgataggcttgcgccaaaaacagcgccgctagcgattggtagattgccgaaccgtccaagttaaatgaataacccgttggaatgacaaaagaagcaatcccttgactaacaccgtaattttgcactttttccattactttgggtaacgctgcttctgaactcgccgttgaaaaggctagcaccaattcttctttgaaaactttcaagatttcaaagatattgatgtgccaaatccgcgcgaccaacccagccacaacaaccacgaaaaatgccatcgttgcgtaacaaacgatgatgaaatagagcaatggtttcaaagcttcaaatccgaattgggcaattgtaaccccgattaatgcaaacaccccgattggtgctaactgcataatccagtttgtcatcttgaacataacctctgaaatcatttcaaaagcatcgatgagcggggttgcctttttaccaaaggtcgccaaccctaaaccgaacatgaccgtaaagaagatgactggaatcatttcaccagaccccaaggccgcaaagaaattcgttggcacgatatccatgatgatatcacccaagccatgatttccagcggtcttagcggctgctgtgtactgactaattgagccatgtgccaaactatgaatgtcaatcagcgctcctggtttagcaatattgccgacagctaatccgagaataattgcgaaggtcgtcatcacttcgaaatacaataacgtcttaccaccaattcggccaagttttttgatatcacccatcttggcaatcccaacgaccaaagaggaaacaacaattggtaacacaatcatcttaattaaattgatgaacaaggttccaattgattgtaagattgagatagcggtttgattatggtagaaaaaccgaccaaccactaaccctaggccgattccaattaagattcgccaacctaggctaattctaaaatatcgttgctttttcatgttttatccactcctcttgaatgccgcaaatcggcttttaaattgccaataagtccattaagtgttcaatttcgtgtgttggctgtatgtctgtcatttgatttgctagctggttcgggttataccacgctgtggcgacacccacgttctgcccaccttgcacatctgaagtaagtgaatcaccgacaatcaaagcttctgcttgtgagattccctctaattgttggaagacactttggaaataccgtggatctggtttttgatatcccaactcttccgaaacaaaaacggcatcgaaatatgtgattaatcctgaatcttgtaaccgccgatattgcgtgttggcaaccccgttggttgtgacatatagcttaatgttagctgcttttaacgcctttaacagagcttctgcttgtggcattaaatcatggcctaatgccaagttgtctaaataattttgggacaatcttggtccatcaacttcctgattaaactgttctttaaagaaggttgcaaagcgtgtgttcaataatatttcccgggttaacgtaccttcttcatactgccgccacaagttttgattaaaggtctgataagttgtcttaattgttggggtcaattgaaccccttgatctttgaataattgggccaaagcttgatcttcatccgcatcaaaatcgaataaagtattgtccatgtcaaaaaataaataacgatactgcattgtaaatcctcatttcaactaatctaaatattgtaatttgcctctaaagtcagacagtttagtataacctttttgagccatgcttgtctgtaattcgcgcgttaaacgttcaaaaataatggggccttctttttgaagcgctgtcccaacttggaccatgctagccccacataaaatatgttcaaatgcatcttgaccagatttaatcccaccagtcccaataatttgaatggctggattcaaacgctgatagaaggcatggacattcgctaaggcggttggtttgatataatcgccaccgatgccaccgaaaccatgcttaggtttaatcacaacccgttcagttgccacatcaattttcaagccatttccaatgctattcaccgaattgacaaacgctaatggaaattgattcaaaatcgccgccatctgatcaaaatgcacgatatcaaagtacggcggtaatttaacgcctaatggaccgtgataaaccgtaaaaactcgcgttagaattcgttctaccatttcaaaatcatagcccgtttgcggcttccccggtacgttcggacaagataagttcaattccaccacacctttaaaatcagaagcactaatctgtgccaacagttgctcgtcttcttcaatattaaatcccgtaatcgattgaaagtatgtcttgtctggcactgccttttgctgttgactcacatagtctaaataataaggtaggccttcattcggcaagcccattgaattgatactgcctaaacgcgttggttgataacgtggttctggatttccagagcggggcataacggtggcactcttggtcacgaaagtccctgccattgaagcctgcacttgatttaactcagcagcatcataacaataaacccccgccgcgttcatgaaacagttatcaaagtggtacccagctagtgtcgtttcagtcgaaatcaatattcttgcctcatctctaatttgtttttagtttattatacgtgaaatggcatcaaaaaaccactgtttatgaatatcattcgtaaataacgtgatataaaatccattccctcttttttaaacctaattaaccgaacaaccaataacgcagcacatataaaaatcccttggtagtgaatagagataatacttccatctattcattatcaagggattattttcgaatccattctaatcgatgacgcgctcaggattgggacttcattgaatcaggcttttttcgcttgtcgttttagaaaaataatatacccaactaagagcaccaggaatatgccaccgcatgatataccaccagttaatggttgttttttgtaaatcaacggcttggtcattagcttgatggtttttgctctgtaatattaaaccgactcgtaaaataccactaaccgcccgacttatcagtggcggttagcttaagcatttatttgcccggcttcagcgcttcattatcccagttgatggcgtactcaaagttcgaattcggtgccatcgcaatgtctgatttgactgtccggtgaagcacttgatcagagcctaacttggtaaccaccgcatcaactttcaagcctctgatcataacagcctttgtattctgtaaattagccgtaattgctgtccgatagttaacgagccccgctttgatgtgattcagtttcagatttggcgcaataatggcatcactttcggtcactttcagaccgattacataagcgaattggttacgcaatgtcacgcgattcttttgctttttaacggtaggctgcccttcacgaacaatattaaaaccacctaataaagtacaatggaacttcttagcaggcattttaattttgaaaatggcgtccttgctactgtgagccggcaccgttacttttttatcccccgtaatcagtgaggcaatattagcaggcgccgtttcatccgcttttttctttgactggctataatcaacgaccccgttttgattagtcaccgccgtattcggactgatgttaaagatatgcgcttggttatccttattttgcaccgtgatactaatcgtctcttcctgattaggtgccagccttaaatcaaaatacgttacactttgattgttttgactgctgggtaaattcgctttaacttggtaattcatactctgatcagccgcttggacggtcgttgtattcaaccacaacgcgatgccgcccattaagatgacgacgctgattctttgtaaaatatgcatccatttcatttttgaagtccctctctttaatcactttgcacatcgattaaaatttagtccgttgcagtaacgacttaacacttgcctctttcaaatttagcggctgctgccagctaattgaagcggtgtatccccaagtgtccaggtcaaatcagcattatagctgccagcataagcgccaccagcgatatccagtgtaatgccgtcagttgtcatcacatctgcccatgttcccatccctttatctttatcagcactcatcaagatttgcgcattatccaacccatcagcaggaacagtaatcgctttggctgttggtgcagcagtattcgttgaatcactagcgactactttaccgactggaaaattaatctgtgcgccttttaagatatgcgttgaatccgttgtgtctttaaattctgaacttttaacggtaatattccagccagcgccagttccccgtttatcggtgacttgtacgttaggatctttaacaatattcttaacgttttgcgcgccaccagtcagtttcaccttaccaaaatcaagtggtgttaaattatcaatcgtgatatcccctgttgcgccagttggtccgtttccgtttccatctgtccctggcacaattggtgggttagtcgttgttgtgtcccctgcttctagtgcaattttcctcgtagttgtttcattcgatgttgtcgcagcctgtacacttggtgccatcacgatatggcctaatgttactaatgataaataatcaccattttgcggtttttgaagttgtagatggtttagcgcgtacaagcgacttggtaaacgctgatatgcactatcttgtcctggaaaattataagcaacatggcctctatctgggccatcattgggtagcaaaccgtcaaaatcattgccattatggtacgtatcgaattcaacggcaaatgacttggcgattgctgagttatcttttacccaagaaaatggattccgccaaacaccaagggcgccaccggtcacttgctgccaattcttaaccttgtctgggtcattcatcattgcaaaggccatcccgtcaaccgattgcgcttttttgtcccctaaattgacatacattaaacttgtaaaattatgtgtcaaatcaatcttatactgctcttccgaccaaattgcccccttcttgttctggctatctggtgtcacttgcacaattccacctgcttgaacggaactatctaccccaatggagggtttaaagatgccatcgattggaatatgggcgggtatcgctgcttgagtacgaccactattgatacagataaacgtcaataacatggtcagcattgttgcacccagcgctaattttcttctatccatcgtctacctccatatgatttttctatttttccattcatcactacacctttggtacggtctagttatcaattgggatatcaaagattcaatcaattaatcaccaattggacttaatgttttttcattctgacaagctattaaattgtgtacaagttgttttaaaacgaatctgttaaatcttttaaagagataatccctgtctatgattatgcaacatgtgtaaacttctttaatgccgatatttgtattcggttccatgtcatcaaaatggtcgcgctggagcttcattttatccgcaattttcatcatctaattttaatctttttataattaacattggtagaatattttcacaacaatgcctatatatcagtatttgtacccatgaacatccctttaaacattaaatttcaggcatgcaaaaaagcccccagagatgattaaatgaaatgcatttaatttcctctggaggcttttttcaaatggttgtttattcagtcaattacggcattaacgaattgcaactgcttctatctcaacaattgcgccagctggtagtttaccaacttgaacggcacttctagccggtgcgatatcaccgaagaatcgcgcatatacttcattgaattcgttaaagtcatccaaatcagttaaaaaacaattggttttcacaacgttttctagggataatcctgctgccgctaacacgtgttgcatattcgtgattgcttgttttgtttgactcgctaagtccggtgccaattggccatcttttaatccgagttgccctgacataaagaccagttgatccgttgcaatcgcttggctgtatggtcccaatggttcaggtgctaagttagtgtagattttctctgtcatgctatcgtccccttcacattattaaatccgttttcattgtaatgcactttgccgcctttgacaacattctttgtgtttctttgcacaaaaaaagcgccgtctcaattaattgagacggcgcgctgggggtaagatttaggggagtgtcagctgaacgacacatttaagctttagatatattgaacaatttgcatcaagattgggacaacgaccacgaataagacggtacttgttgtgacaacgttcgttgcatatttaacgtcaccatgtgattgaccaactaagattggtaagacagccaaaccaggtgttgcagcttgaataatcaatgtgctttgttcgattgatggaattgaagttgtgttcttgaagaatagcatgatggcaatcatgatggctggtgccacaacgaaacggcctaataacgcaaggactgtatcgcggtcgaaatggattgatttcaaaccagcatcagctaagataatcccaatgtagatcaatgacattggtgttacgatgccaccgaccattgagaaggttttatcaactaattctggtaatggtaaaccagttaaaagataaattaatgcggctaagaaaccgattaatggagaaggtaataatttacgccagttaaatttgcctttagcagcgcctttttctttggttggatcatcatttgagatgaagaagaccccgattgcccatgttgaaaccgtattggccacatagtagatcaagaagtaaggtaaactcttgtcaccgaatagtgccaagttcaatggtaaaccaatgaagatggtattggcattaacgaacatattgataaatgtcccacgacgacctggccgaattcggaaagccttggttagtaaccatgccacgagataaccgagggcgaaactaattaagacgtaaatcaagccgccagataaaccgaccaacttttcacgggttaagttatctaatactgagacgaaaattgataatggtaaagcgacattcatgattaaaaatgaaattgtgcctttaaaattatcatcgaatttttttgaactccgtagccaaaaccccaatgcaatgactaagacgatttcgacaacgcttgataatgatgttagaaatgctgccaactctttcacgctcctaccgatttatatttaaattatagtgctttgtattctggttcccatttcatgtctgcgacggctttttgcacgtcagcaattggttctttattcaaaccttgatcaacagcgctttgagcaacagcgttcgcaaccgtttgtgagaagatatctagttttgtcacaggcggtaagacagctgcgccaggttctgttggatcaacgatgccacccaatgagtgagctgctttgctaatcatttcgtcatttaagactttcgcagttgacgcgattgtgcctaaaccaagccctggatagactaaagcgttgtttgcttgaccgatttcatatgtgacaccgttgtattcaacaggtgcagcaggaatcccagtcgctactaaagctttgccgtcagtccacttgattaagtctgcagcagttgcttcagctaatttcgttgggtttgacaatgggaaaataattgggcgttctgtgtgagcagccatttccttcacgattgattctgtaaaggtcccaggttgggttgaagtccccactaaaatagttgggtggattgctttgacagcagcttctaaagttgttaattcatcagcattcgcgaattcactccgtttgcgcgcaaatggtttttgttctggtgttaattctggatcatcatcaaacaatagcccttgcttgtcaaccatgtagaaacggctacgtgcttgttcttcagttaaaccttcttgtaacatttcttcgaagatgcgatgggtaatcccagcacccgcagtcccagcaccaaagctcatgtaaacttggtcggtcatcttgccaccagagatatttaaagcgcccataatcccagctaatgtgataatccctgtgccttggatatcatcattgaacgtcacgatttgatctttgtacttgttcaaaatattagcagcattgctccggccaaaatcttcaaagtgaagatacatattagggaataggtcttcagctgtttgcacgaattgatcgacgaaatcgtagtaacgatcgccgcgaacccgttcatgacggttgcctaagtataactcatcattgagtaagctttcacggttcgtcccagcatctaaaacaactggtaagacttgactaggatcaatcccggcagcagccgtataaaccattaatttaccaactgagatatccacaccttgtgtgccccagtcgccaatccctaagattccttcgccatcagtcacaacgattaatttaatttcgcgaccatcagcagcgtttgccaaggttgtcttcattgaatcaggatcgtcgattgataagaaagcagcgttttgggggttcacatataaagcactgtagttttcgattgtgtcagcgatcgttggatcgtaaaccactggcatgaattcagcaacatgttggctgaataatttaaagaacaacacacggttttcattaaaaattgacattaagaaaatccgttgttcaagcatgttggcttttgattgatattgggcataagcttgtttaacttgttcatcaatggtttgcacgtgaggtggtaacatccccgttaaaccaaattgtgcacgttcttcagcagtgaatgctgtacccttatttaaaaatggatcatttaaaatttgttgtgctttcatattaaaaatctccttttcttttatatcatgttggtcactatacacgcctcaacatttgatagtcaaaacttacatttatgataaaatagatttatatgaaacgtctaaactgcattaaacaggagtttttatgaagattaaagatttggcctattttgctgcgctaattaaattaaaaaattttacggcagtcgctgatcaattcaaggtcagtcaaccgacgatcacttacgcggtcaaacgccttgaagatgaattcgcgaccaaactcattcagcgcgatcaatcacaccaatcattgattattacccctagtggtgagcaactttatcaacatgccgcgcgaatattagcggagattgaactaacaaaggccgacatgctcaatctcaacgctactgatttgcgttttggcttgccaccaattatcggcacttactacttctcaaaattagcacaaaagctagccgctaacggcacgattcaacattttaagacagctgatgggggttccaaagaattgttggcttcattagaagccggtgaactagatgtcgcgcttcttggctctgcgacgccacttcaaaccgataccatcacagctaaagtcatcgaacgtcaccattttaagattgtagttgcacctgatagtcccttagcccagaaaccagcggtcacctttcgtgatttagcccacgagaaatttattatgctcgcggaaggattcgtgcatcccgtggtcttcaagaacttatcggacgtcaatcaaatcaaacccgaaattatttaccgcaccaatgacgttagtgtcttaaaaagtatggttcacgaaaatgtcggcatcggttttctaactgaaaccagtattacgcctgctgatgacttagtggtacttgatttattggatgaaccacaaccaatcttttacatctcgttagcctatcgtaagacccagttcttctcaccaaaacaacaagctctcatttcgaatctcgaacaagcagcgcgagactaccgtcttgaacattaaaaaagtggtggcgacaaaattaatttttgtcgccaccactttttaagtatgttttaccataaaaacgctaagacagtttgattgactgcatgattttcgtgtaattgactatgctgcgcttttttaccagtaaacttcttttcttgataggtcttcgcaccaggcgtcaccaaataccgcaacgactgtgacgatgcattactaacacgtccgtcagaatgcgtcccatcgcctaaatccccatagatattcaacaccgtaatcgatttagtagggagctggttacgcagtcccatcagttgccgataagtcgcgttcattttttgtggttggccatcctttttaacctggttttgattaggctgatcatccatcccgataatcccatcaaaatgacccgcaatattcaccatcttcgccatacggggtaactgtttatcaatcgcatggttcaataaataataaacggccgtcaagttgcccatcgaatgagccaccacgttgaatcgtttgaagctgtgctgccgattaaccgcgactaagacgtttttaaaccactcaccatcttgttgatagttaggattgcgattatcttcgaaaacaacttgcacgattggtcgtgtcgttttagctaaccaacgcccctgtaaatcaactgaaccatccttacgaacggttgcagtgaggacctgtgtcgcattcttttgttcgcgagcagctttgatcatgctatcagtcgaacgagccgaaccgccataaccatgcaaataaaaagtgggctgttcattttctgtttgcttgacttgctgcgctttttgcgtcgttgcatgccctaaaagccaccatccactgccaattaaaactcctaaaccaatgatgattattatccatttagaacgtcgcatgcgcccgaatcccttcgcttttctaattacgcctatggtaccataccattcataaagggtgtcaattaatttagcgtaagttgatcaaaaaaataacccgggtcaattgacccgggttattttgctattaatggtaataaattgtaattaatgttactagcccaaatatgattcctgggacatttgaaatgatgattggccaatctttatgtggtttaaaccaaccgtaactaaaccacaaagtcgcattaaccatcgcaacgcttggttgaatcgccgacacagggtgcccagctaaattagccataatttgttggatatatgatacgtacatcaagaaacatgtcccaactgctatctttccaagccaagccagttgattgcgatcactatgaaccgtcgctgttttttgatacctaatcgttacatcttttgttttcatcttctacctcgtcactagtcttcgacagttatagtggctacgcgatcaattaaatgtgtcccatattgaaaagcattggcataaattgttagcgtcccgtctaaagcctgctcaaactcaaacaacgcttgattatctaaccaagtgatgctagttacgcgttgcggatattgattaaacactatcttccgcgccttttcgccacccagcacaacattactattacctatattacctaaaccatagacaaacagatagtttcctttgataaaatcggttgtctcgccacttgccaagtaggtctgattttcataatgatttgtcgcataaattgcttctccataaactgacatccattgtccgacaatcttcaataacgactgtgaaaatgctggaatggcaccgtcaaattcaagcccggtattaattaataaattagcaccgacttttctggaattacaaatttgatcaataagttgcttcggtgacacatagttaatgtcatttttagcaaccccccaatgcttattaaccgtcatcgaggtttcagctgctaaatatttttgtggtccttgatgattaatcgattgtggattaccccgttcaaatgttaaaacatcgatcagcggattgcgaatcgcaccttgttcctcaagaccagtgttattattatttgtaacgcttacattttaagcggtatacttaagtaagtgaaacataaaatcatcaggaggtctttattaatggtagcacagaaaataaacgcatcagatgcaatgttaaaagtcatggcagactggggaattgaccatatttttggtttacccggtggctcgtttgattcaacgatgaatgcactacataaccagaaagcgattatgcgttacattcaagtgcgccatgaagaagtcggtgcactagcagcggcgggtgaagccaaagcaactggcaagattgctgctacatttggctcagccggacctggtgcagtccacttgttaaatggtctctacgatgctaaatatgataatgttcctgtattagcattagttggacaagttgctacgggtgtgatgaatacggattatttccaagaaatgaatgaaaaccccatgtttgctgatgtggcagtctataatcggacggtaatgacggctgaacagatgccacttgtagtcgaccaagccattcaacaagcctataaacaccgcggcgtagcagttgtcacgattccaactaacctaggctgggaaccgattggagataacttcgaggccactgcaaacttattccaaatgggcaattatccagagccaagaagcgcggatattgatcgtacattacagttaattaaagatgcaaaacaacccattatttattttggtcaaggtgcacgtgctgcgggtgaagaattggttgctttatctgatcggttgagtatcccaatgatgtcatcagccctttcaaaagggattgttgccgatgaccatccagcttatatggtttcagctgggcgagtagccacgaaacccggagttgatttggcagaagctgctgatctaatcttatttgtcggtagcaattatgaattcggtcaatacttcttcaagccagatgccaaatttattcaaattgatatcgatcctactaaactaggacacagacaccatgtggatgtcggaattttagcggatgctaagacggcattaaaggcattgctagccgcgagtgaaccagttgccaaaaaatctgccttttataaagcagcactcgccaataaagaaaactggaatgaatggaaagccagttttgaagaagacgatcaaacaccgttacgtgtggaacccgtcttcaaacaaatcaatgagatggccactgacgatgccatctttaatctcgatgttgggaatgtttcaatcgatggggtgcgtttcttgaaaatgcatccaggccaacgtatgacgttatcagcatggtatgccacaatgggttgcgcagtgcctgcagcaatcgggacccaggctgcctaccctgaccgtcaaatctggtcgattagtggtgacggtggcttcacgatggtgatgcaagatattatcacgcaagttaaataccaaatgccaatcatcaacgttgtattaagcaacgattcattcggattcattgaagctgaacaagatgataagggtcaaccacactcaggggttgccattcaaggggcagattacggtgcagcagcaacagcgatgggcgcaaaaggatttacggtacggacattagctggattgaaagctgcttttgctgctgctaaaggcacgaaggaacctgttgtgattgatgttaaaattgctaacgaacgtccgttacccgttgaacaactcgtgattgatgatcaaacacaggatccagcagaagtagcggcctttgttgaaaaatatcatgcacaaggattgaaaccatttcggacgttcttagaaagttaagcttttttaaatcagactagcgaccgataaaaaataatgttgaatgtggtaaattataattaaaattaaccttggaaggaattcagcggatgagtagaacaatttcaagacgcttaatcagcgcaacgtctctcatggcattaatcggaagcatctcattggctatttattggtctcggcttggtctttttaataacacgaccgcgttgcaggcgtatttggggcactctgtgctaattggtccgctgattttcatcacgattcagattattcaagttgtgattcctgtcattccaggcgggattagcaccgcagccggggttttggtattcggcccactttgggggtttgtttataattacgtcgggattgcaattggttctatcttgaacttcttattagcacgacaatttgggaagccgttcatcttacacgtcatcagtgaaaaaacgtatgacaagtatatcgggacaattatggaaaagaaaaactttgtgcgcttcttcgcacttgcgattttcttaccggtcgcaccagacgatgtcttgtgcttgatggctgggctcaccgagatgtcattgaagaaatttacatggatcattattttatgcaagccagcttcaattgcagtgtatagttttgcgctggtgtatggcggtcaattcctaatgcaattaatgtaaaaaaaggcccaggatattttatcctgggccttttttgcgtgtttaggcggtttttctctttaacccgatgccagtaacggcactgagaattgagaagattggtgataagagactgaagaaacaaaatggaaggtaactcaaggtagggacgcctaaagtattagcggcaaaaacgccagcgacgccccatggaacgaggtagttgataactgtcccaccatcttcaagggcgcgccctaaagcaagattactcaagtttgatttttcaaaggtgctcttgaaggctttaccagggagaatcacagaaaggaattcttcaccgataaagaggttaacgccaatcccagaagcaataacggcgctgagcaattgacctggcgtcttaagatgggtagcaagaggggccatcacgcgttcgattaaaccaagcttcattaagaggccaccgagggttaaggtcaagataattaaggcgacggtgcttaacatgctattaatcccaccgcgtgagagcaaggcatcgatacttttatcgccggtgtgggcaacaaacccattttcaatgtaactcgcaattttagcaattggtgtgtgtgggttgtggaaaaagattaaaccgattgaaacggcaatgtttaaaaagagtgttggaattgctggcattttaaggcgagcacaaacgaaaattaagatgattggaattagtgcaagtaggctaactgaagtgtgcgtgtttaagacagcaaccgtcgcaccaattttatcgagggagacatttttcgaggtgtggccaatgatagcgtataaaattaatgagccaacaaacgctggaaccgtggtccacatcaagttcttaatatgttcaaatagatctgtttcagtaaccgctgcggttaagtttgttgattgtgaaagtggcgatgacttatcaccgaatattgccccggaaataatagctgcggccacgatggtagtgtttagtccgagtgtggctccaatcccgaagaaagcaatgccgacggttgaaatgacggtaaaggcgctcccgatggcactgccgacaagcgcacagacgacgaaaatcgagggaatgaaccagtggacactgaccattttgaagccccagaccatcaggctaggaatcacaccggcggcaatccagatactgattaaggcgccgacgagaatgaaaataatgataggaatgattccgcttttgagaccatcttcgataccagaatgaatggcgtcccagctaaagtgccgccaacgggcccatagaatcaagagggcaatcgccgttaagacgggtgtttgtggtgaaagttggaaaacaatcacgccgctacccatgatggctagcagaataagtaaaacgatacttgcttctaataaactagttttgtgttttgtcatttaaatcgcatccttttaagtttaatggttaggctggtgcgacaaaagactgataacggaggattcccccgcacgatgcaatcttgaacatgaaaatccctccatagttgaaatgtgtttttgattggcaatgttctatgcaaatgtttagatattaagcgctaaatcacgcactctacaaaaaaagtccctactcgctgatgcgaatagggacgattggaaaccgcggtaccacccagttaacgtgtcattttaaggtaacacaccactcttacaggtgataacggtcctgttaattagccgaatcatccattcagtatttcgtaacaattaccctgatcggttcgcagcaaccaccgactttctgacacccagataatgcactacttagtttgaattaagatgacttatgattgttattcaatttacggtagttcgaattaaaagtcaagcatgaactttagaaaaaatttgtatcttgtaaattgtaactgtaatctaactggtaagaatcgcttggtaatgggacagtttcagcaaaacgctgctcgaattcgtcgaggggcaagcttgtccacagacgaaaactgtgatcatcataagcggcccagtcacaaattttagttaattcgggataccgttgtaaatcaggaacaggtgtctcaataaagtgtaaaaaataatcataggattcggcttgttgagaaacggtcgaaaataaatggaaataatcgcggaatgtcatcggtatgctcgctttctacaagagtaattaatcgttattagtataaactgaaaaagtggtataccacaactttggcgcttttgtttaatggaaacataagaatttacttggcgcaacactgtaagtgggttactatgagtgttgatatgacaaaggagttgttccagatgcagattaggactgccacaactgaactacggcattttcaactaatggatcttgaagtggtctatcaaattggttgtcaaaaaaagattgtgacgcagctaaatatgacggcttttcaatctcaacaagaagcacagtcgtttctaacaatgttgatgaatgatgaggatgcttgggcgattgttgatcgcacaacgcaggtggtgcaaggattgataatgctcgcccctacccttagtgcggatggacaatcagtcgcggcatatgaactcagttttgccatcttaccggcatatcaacgatgtgggattatcagcgcagtattgccggcaacgatgcaagcctatgcgcaagaaactggtgtaaacacctttaatgcggcctgctttttaaccaaccaagcatcgcaagcgagtttacagaaagttcagttcgagaagacttatcaatcacaactaccggattatttaggcgggcaacgagttcagtactaccgccgaatagtgaacgttttcaaattgtaaaaataacatggttataaccgtaataaatcacggtttaaatgagaaagctatggtataatcggtttgaaagacaaatgggggggtaatcaaatggcaaacgaaaacgaccaagcctatgcacgaaagttagcgcaaattgaggcaaacgaaaatttgacgattctatcaagtatgaatcaggttaatgatgaaaaggttaagcagtacatcgtctatacagactatcgcgaaaatggtcaacaagaatcgacaagttcgatttttgtctacacaccatacgctaatgtcgaccgctttggacattcaacggttgattttcaagcacaactcttatttgaaaccaataaatggaaaaaagaaatgcacattacagttcttgaaacattaggagcagcttcacgcttagctgtttatgatttccaaaatcttggtttagcacaattggcagtgaaagccttctgtaatttagcgaataagttggaaattgaaacaattgatggtaatatcagtacgttcgatagagatgattttaagaaagttgcacacattcttgaaaaatatgggtttgaggtacaaaccgacgcaggtcaatcctctggttcattcactaagacgcgaaaggcgtagtgcgcgactgttaaaaaggggatagggctaatgcatttaacacgggcgtttgaacaagcaacttgtattatcgtacttttggcgacgcaagatcctgaacacacaatttcgtctgaagtcattcatcatcgcttaggcgggtcacagacttacctacgcaaaattattcgtaagttagtagtggctgggctagtgaaatcggcttctggtaatagtggtggttttacactagcgcggccagccgatgaagtttcaatctacgatgttgtgttggccacggaaggacaaattaagtcttatccagatacgggtaagttggatacggtcttcaatgacttccaacccgttgctaaacaaggaacattgattattaacgctgcgttccacaaggcggacatgctatgggcgaacgagttaaaacggcaaactgtttctggcttgattattgagacaattgggcatcaagccattccagtgattgattggaatcaatcagccgaacagcgtgaattactcatccagaagatcattaaaaatttaaaatagagtgaaagcaatccggttgttggattgctttttttgtgctgaaattgaaaattagttttcaattgattagttgatagtttcagaaaattgagaatttatttaaaaaatggacaatggcatatccaattaacgccgtaccacttgttaacaaaggattaagattaatagtgaagaaaataattaacaccaaaattaaaaatatatatttgctgaaaacttattattttattacataaaacgtactctgaattagaaggagtagcgaatagaatgagacgaatgaagcaacgatttggattgttattagcggtggttgccacttttggcctgatgttgatggttagtcatcaaccagttcaggcggagaaagtgacttattcggttacgcccgtctatcctgataatcaaacggatacggagttgggctattatgatttaaaagttactcctggtcgaaaacaagaagttggtgtgcgggttcaaaatagtggaacaaaaccaattacggtcgatgtgacccctacgacagcgacaaccaatgaaaatggattgattgattatacaggaaccaatactaagcgagattacccgtcaggaagttgcaaaatataacgataaggccgttgaattaccagagaacaataactggtggttatatgtcattatcggtattatgattgtcattatcctactattgataattcttttatggcggaaatcacgcaaagataaagaacaataagcaaaatgaaaaccacgattgaaataatcgtggttttttaatggaaataattgacgtggttgtgtgaattctgtatactcatttctaacaagataagaggtcgcaaaaaccatgagtcgttaccctgaactgactaagcagtaatgagggataattaaaggggaatttgccgaaatgtcaatttgcttattcattttgatgttgggacttggttgaataaatcaaggactgtcgtaacgaaatgttacggggcgctatcaacggatattataaggctatcagtctttttgtcgtttttagcagacaaaaagactgtttttttgtttgctagaacgtggttggggctttttcttgaaatcatagagaaaagagcgaagtattatggcaggaaatgaaatgaagcgggagttaaagacgcggcatctttcgatgattgcgttgggcggtagtatcgggacgggcttgtttgtgacaagtggttcagcaattgcaaaggcaggtccaggtggtgcattgttagcctattgtgggattgggattatggtcttcttcttgatgaccagtttgggtgaaatggcaacgtacttgcctgtctcaggttctttctcaacctatgcaacgcggtttgttgatccagcccttggttttgcgttagggtggaattattggtttaactgggcgattacgttggcggttgatattagtaccgcggcactcgttacggaattctggcttcctgatatgccagggtggatttttagcttagtcgcactattattaattttcttgattaacatcacgagtgttaaatcattcggcgaaacggaatattggtttgcgttaatcaaagtgattacggtcattattttcttaggtgttgggttactaacgattctcgggattatgggtggccatcatactggcttgagtaacttcacttataagaaggccccatttgttggtgggttaccaatgatgttgagtgtcttcgtcattgctggcttctcattccaaggcaccgaactaattgggattacagctggtgaatcaaagaccccagaaaagagtattccaaaggccattaaacaagttttctggcgcattctgctattttatattctttcaatcttcgtgattgcttgtttaattccttatgatagccactcattgttgggcgcgagtgaaacgaatattgctgttagtccatttacgttagtgttcaaacgggctgggttagcttctgcagccagcatcatgaacgcagtgatcttaacatcagtgttatcagcggcaaactcagggatgtacgcttcatcccggatgttgtggtcaatggctgaagatggctatgcagctaaaattttcgctaagacaagcaaacgtggcgtcccagtaatggcactgattggtacaacaatcataggagctttaacctttgtgacaagtatttttggaactcggatttatttattcttagtggcagctagtgggttgactgggtttattgcttggttaggaattgctgtgtcacattatcgtttccgtcgtgcgttcaaggcacaaggtcatcagttgagcgaattgaaatatcatgcacgttggttcccatttggtcccatttttgcattcgtgctttgtttattggtgattgcagggcaagatattcaagcctttaagaacttcgattggacagcgattgggattagttatatgagcattccattgtttgtcgtactatatgtttactataaagtacggtacaaaactaagatgattccactagaagaagttgatttatcaaaacataaatagcgtgcggcttacggagcacgtttagattacaaaaaggcccgacaatttaagttgtcgggcctttttgcgttattgtagcgagcgttgatcaccagctttgaaatattgttgataaggtgttaatcgttgcttgaagagctcgttgactgtcacgaaatgtcgtttttgagcggtttgttctttagcaattgcgggtaatgccttaatcgttgcctcacttgtgtgcagtaggacaagatcaccacctgtaatacgctcatttacatttttggcaattgtcggcgcatcaatatctaagcgccaatcttccgaatcaacactccaagcgattagtgcccggctagcagcggttgttaattccgtactaggggtttcggttgtgacccgtaataagtgtggcaattgaccactggctttgaagtaggcggcatcggtttgcttgaggttatcggcaatttctgacgcgctcattgtatccaagtcatcatcgttgttatacgcttgggtgccaacgacatggccagctttgagtaattgcttcagttgatccggatgttctttagctgctttaccagtagtgaaaaaagttgctttgatgtttaaatcgtttagttgattaatgacactcgtaatagtgctaggttttaatgtcgtattaaaggtgagtgcaatctttttagcaccaccttttttggaaggcatttgattgtcttctgggacaaggttgggattgaggtatggaccaaccgttgccattggcagggcaattgtttcaatatcaagaggattctttgcgaatttcaatgttagaccatctgttgtaaagtcaaaattggttgcttgatcatttcccgggaaatcaagtgcttccaattgtgtaagttgttcgggggtataatcatgggcttgtaattgttggttaattgcaagttgacgaatcatcggaattgttgtgctatctttttgtaaatctttaaacgaaaccgatgttgtattgtgctgcatatcatagatggcttcagttccagtttgtgaaaataagcgttgataacgggtcttaaaccgtgattttacaaaaccataagcctcggcggttggcttaaaagcatacgtattgtcttgcaagttcttagcagtataactgacgtacaacgtgatatggtcaatgtcgggtgattctttgtgtgcttttgcataaagctgattaccgagtgcgacttcttgtttttgtaaatcgatattggccccattttggttttgtgggacaaaataatagatttttccatgcggtttggctgcagcgtagattttaaaggccgcgtattgaccgcttgcttggtcattaaaatcacttaaaattgactgctgcatattcttttgcgactgtttaaactgctctctcataaaatattggttctcaaaatacataattggtattaagaagagtgccagaacaatcaaagtccatttttgccaagtccgcatgaatactatcctccagtaagtttgtttatctaaatttagtatactgaatttaatcgcgacttgaaagtattattcgtgaactaatctacatacccgatgctccgatttcacccaatcatgataaagccgtttttggccaggaccacgattttccaggcattcaggtgcctgagattcgctctgtcacattagctgatccgggtgccaaaaatgcacagtctgtaaaatcgaatggccatgcgcagtttaattatgcggatggcacactgcatgcggccccgcagtacggaattacaggacaagtcgacctagttaacccgcctgattcttttgggttatactatcgtgttaatgcagatcaaaatgcagtgtggcaaccggtgataaccgattcgcagttgcatttatcggagagctttatggcacagctaattaatgctagtcagaatccgactactacggagcaagggctgcattgtgatgtcatgcggacaagcgacattgagtttacgttgtctgaaaaggtggcaagtgcacctattgcaaatgatgatttaaatccaatcgctaaattccaatttaaattaactttaaacggggcagtagaggttggcatcccgaaaacaattacgtttgatgacgaaattttgggtcaaagtaggggggtactaatcggacgattgcgctaaatgaggtaccaagtgtacaactaaaagtggcagatactggtacaccaaaagcgccgaaagtagtcatatgtaatccgttgtgtagtcattttgatttacaactaggctatctggggataaatcaacgacccaataatcccttttatatgcaagaaaattttaaataccgcttaaatgatagtgatgcaaaagcattaactaatgagtcgcctgataatcaatggattgatgggattctacagcggccaatcagtgagcaagatttaacgagttatggaaccacagttggttggaaacaaagtcagttacagttatcactaccttataatgatgcttatcagattggcccatataatgctgatttgaaatggcaattggtgatttaagttattagcgtgtcaggtttaattagagctgatgacgaaattattttcagcttttgaggcggtgtgtgttaataacgcattgccttttgttatacgcaacaaatatcgctgtagaatggttatgctttaatatcgattgatggtaaaatatatatcaattatttggaacaaggggttaagcaatgtggataccaatagtgtttatttaacatcggcagaaaaagataagtatgctcttttcttagatattattaatgtcaaatgggatgaattacccattaaaaaacgaatgagcatggctaaaaaaggcgaagcactaatcgatgacgtcaatttgaagcaagtggcaacattgttagaccgtaattatagtagcttatacaatacgtatgtcagtattgttggggatctgcaggcaatattagggacggaggaagatgatgttaagcgactcttcgcaattccaagtgatgtctatcatttatatttagtacaacattctgacatctatgatttcgtacagattctattgcggggcggggatatatcgtttaaaaccttcttagcagagcatgatagtagtaaagcaactgtattacgtcatttgaagcaagtccgcgatctaacccgcgccttcaacttacgggtttcatacgaaccaatccggttggaaggggatgagaagacaatccgattggtcttatccgccttatactggttggcgtctggtgggcatcaatggctatttgaagaaatcaatcacgaatgtgttttgtcggcctttgactatgtctgcgatgaatttcaattgcaaaagcctaacctattaacgcgcgaaattggcgccacgattctggcagtaacttattatcgggtgatggccggtgcagtcgtgcagcccgatgaaaaattagcaactattcggtatccctatcctaatttaatcagtgatttacttgcagccgatttcactaaagaatcaacgggattacgaacttgtttggcagagttaacgttaacggaagggcgttcagaagccgctggactattcttcttgttacggtattgtccagtaccgttacgctcaataacaagtactaaggtgactgctgattgggcagatgaacgttatataccagaaattcatcgttttgtgactgcctttttggagcgtattccatttgatattatgcatgagttagagatttcgcagcacacatatgatattttcaaaaatgcgttgttaacgactacggtgacgacctatatccttgggatggacgcgacctctgtcgtttttaatgaattagtcattcgtatgccgcagctaaaacccaatgaactactccataaaaaaattagtgataccgtagattacctcttattcgaaccagcttttagttttttagcaagtgggcgggagaatttgataaaggcttactataatttaattcaacaagtcatccagcagtatcatcctgtaagccaggtgaaggtcgcactcgtgattgagcaagattacattggctatatggatatcttaacagcactcgataatatcaaatatgtcgctgttagtacgaccgatgaagctttacgggatgcagacctgattgttcggacgtcgagcattgccttacccgaaaacgttaatccggaggcgttgtattttacgtggcgcttaaatgctagtagcgatcactatgcccggctgtatggcattattcatgaattatggatgcaaaaaggtacccaagcataataaaaaagccgttcgacaatttgtcgaacggctttttttgtgcaattaggcacccatatttgcttcttgttctgcgtttaaggctttcacccgttcgtcaatcatttcgatgactttttgacgatcagcttcgttttcaacgaagtctaatttgtcaccatcgatttgcatcttgggactttcgtcataggcttcataccaagcatcataacggctgtttaattctttataatagtcgtagagggttggatcggcttctagttgttcgtatgaacgaccacgtttttgaatccgtgaaagcattgtttcgaaactaacgcgtacatggattaataagtcagggcgtttcttgtgggcagcaaatggcaattcttgcatcatgttggctaataattcgtcgtagacacggacttcggttgcggtagcgcgaccaagatcagcgttcaagtggaagagtaatgaatcttcgaaaattgaacggtctaagatgttgttatcatctgtatatgcttgtttgatactatcaaatcgtttgtttaagaaatagatttgtagtaagaacgcatatttagttggatctttgtagaataatggtaatacttcattatcgtctactgattcgtaaaaggcttcagtgcctaagtgatcagatagatatttagttaaactagtttttcctgcaccaattgtgccagcaagtacgagcaatgtcatcagtctccctcttttgaccataaaatgtgtttaaattattgttgatatacaacatatggtgttttacaaccaaacgtcacttaaatattctagcatttctgacgtaaaaagcaatctttgattttaaacaacgcaatagttactatttgcacaatttatggtaggattaattactaattataaggatttttactagggggaatcggtttgaacgcaagtgagagtatttttctaacgcaagcggaaaatgataagtacgccttattaatggagattgttggtttaaaacgggatgagttgcctgttaaaaagcggattgaactatcgcgtaataatcagccgctcgttgaagatgtgaatctaaaacaagtagcaatgctattaaatcgcagttacggtagcttgtacaatatgtacatgagcattattggggacctaaaggaaattatcggaccggatgttgatgatattaaaaccttgttcagcgttccaacagatgcctatcactatttattagtgaataagtcagaagcgtttgattttatcaaaatcttactcaagggtgagaccgttacattccaagaattctgggaagcccatgatacgagtaaggcaacggcgctacgccatttaaaaggggtgcgcgacttaattcgctcatttgatatccgtatgtattatgattcacttcggttagaaggcgacgaaaataaaattcatttagtcttaacgatgttattctggatggcaacggaagggcatacctggccctttgaagatgttaaacgagacgatgcacttaaggcgttcgatgttgcgattgatcggttccaattggaaaaaaccaatattttgacccgtgaactaggggcgtattcaatcgtcctaacctatttccgattactacaaggtcacacggtttcaactgaactagatggcgattttatccgttatccagttcccaatatggtttctgaatatctaaaatagccctttgaagaccaagctttacggatcaagagcattcttgcacaaatgacccaagaagaagcgatggctgaatcattcaatatatatgacatcattaattttggaccgattcagattcaggatgctaatccctacatggaatcttacgaaacgcgatacaagcggtatattccagtgatttacgaatttgtagaagcttttattgatcaaattccgtttgatatcaagaaatacctaaacttagacgatgcgaattatcaaggtttcgtgcaaacgatgatttcgatgacgatgaccacgtacatgtttaaacaagatgtgacatcggtgctcgctgaccaaatgatggaaagtgttgaatatctcaagccaaatgatgtcctaaaataaaatattgatgatacggtggattacttattaatcaatccgaaagtgtcattcttagtcaaattacgtgaagaattggtcagtggttactacaacgtcttgcgtcagatgattcaacggtttgcaccgatgaataaagtgaaggttgtcgttgtgacggaacaatccttcctcgggtactttgttttgatgactgcactgaatagtgttttgtatgcggatgttagtcaatctgacgcggatttaatggatgctgatatggtggttacgacttcgatcattgatttaactggcatcgttaacccagaagcggtgatgtttaaatggcatcaaaatgcagatagcgatcattttggacgtatgctcggtttattacggggtctatggattcaaaaatcatctattgatgattgaatttaaagattaaatgcggtattcttacattaagaagtaaacacgtgaataagcgcctatatggattgacagagagataccggttggtggaaggtattgaatccagcattccagcgcaatagtgggtagtgatgaactacacggttcctggccgttatcagtaattgagggcacctattatttgtagtgggtgaacttgggtggtaccgcgaattgaagtcttttcgtcccaattaagggatgagaaggctttttttattgttgttaattaaagatcattaaaaggagagagtgcaatgttagatattaaagtcattcgagaaaatgtccaatgggcaaaggataagttagctagccgcggtgttcaagctgcagaaattgatgaggtcatcgcattagatgaaaaacgccgtgccttaattgtgaagaccgaagaattgaagaaaaatcgcaatgctgcctcagaagccatcgccgttgccaaacgcaataaagaagatgcgactgaacaaatcgctgctatgaagaatgttggggccgaaatcaaggctttggatagcgaattggctgaagtgaaggccaaagtggactacatcttagtccgcttacccaacttcccagatgattcagcacccgttggcccagatgaaagttttagccgtgaagaacgcaaatggtcaacaccccgtgaatttgattttgaaccattagcacactgggatatcggtgaaaaattaggcatcttagactttgaacgcgccgctaaagtatcaggtagtcgctttgtttactataagggtgccggtgcacgtcttgaacgggccgtttataacttcatgttggatcaacatgctaaagaaggctatgaagaaatgatcacgccgtacttagtgaatggcgaatcaatgtttgggactggccaatttcctaagtttacggaagatgtttacacaatgaccaacgaaggcgaacccatgactttgattccaaccgccgaagtgccattgacgaacttctaccgcgacgaaatcttggatggcgcacaattgccaatctacttcactgccttatcaccagctttccgttcagaagcaggaagtgccggccgtgatacccgtggtttaatccggatgcatcaatttaacaaagttgaaatggtgaaattcacgaaaccagaagaatcattcaatgaactagaaaaaatgaccgccgatgctgaaaatatcttaaaagcattgaacttgccatatcacgtcatcacattggcaactggcgatgccagcttcacatcagctaagacatacgatatcgaagtttggttaccagctcaaaatacgtaccgtgaaatctcaagttgttcagattgtacagacttccaagcacgccgcgcccaaattcgttaccgtgacgaagatggccacgtcaacttggtgcacacattgaacggttcaggcttagcagtcggccggacagttgccgccatcttggaaaactatcaaaacgaagatggcagcgtcacaatcccagaaccattggtaccatacatgggtggcatgacgaagattgaagcaaaataattaatttaataggaagtcatttgtttcttccataagggagacggttgttatataaataacgaccgtctttttttgctagattagaaacagttgtgaatagagaatagtttggcgcataagacttgaaatttaaatgaaaaaaggttagactaatttagttatcgtggatattgaatgtaatcaattaagcaacttatataattaaaggagattttagcatgaagatgattcaaaatgaatttaagttcattgccaagaataaaatcatcatgatttcgttaatcgcaatcgtgtttattccgttcttgtacagtgtctttttcctgaaatctgtctgggatccttacggtagcactggtgaactaccagtcgctgtcgtaaataacgatcaaccagcaacttacaacggtgaaacgttgagtgctggtaaggatatggttaaggaattaaagaaaaacgaccaactaggttggcgtttcgtttcagccaagaaggctaagcaaggtttgaaggataaggaatactatacagtcgttactttacctaagaacttttcagcaaacgccgcaacagtcttggataagaatcctaaaaagatgcaaatccaatatgaaacaaacgattcattgaacttcatcggggaagttatcagtgaaatgggtgccaaggaattgaacgcccaagtacgtgaaacagtgacaaaggcttatgctcaagtcatgttcaaacaagttaaaacagctggtaaaggcttcagcacagccgcttcaggggctaagaagttaacgaagggttcagtcacactttcagatggcttgaacacttatacagctggtgttgataaggtcaacgatggtgtcatgacaatgaagaccagcgtgacacctttatcagacggtattcaaaaattagcagccggttcaggggccttaaacacaggcttacaaacattgaatagcaaaacaggcgcattagcctcaggtgctagccaattggacagcggtgccaaccaattgaacacaggtctacaaacattgaacagtaagacaggcgcattagcttcaggcgcaagccaattgaacaacggtgccggtcaattaaacacaggtttacaaacgttaaatagtaaaacaggtgcgttggcttcaggtgctaaagatttaaatgacggtgctggtcaattaaacacaggtttacaaacgttaaatgatggtaccggacaattagccggtggcgttacaaaattaaagagtggattaaatgccttagatagtaatagtgatcagttagttgctggtgctggtaaagtaaatggcggcgttgatcagttaatcgatggtagtcaacaattaagtggcgccttatctgctgctgctaatatgattgatgatcagttagatagtaaatcagaaaagttagatttattgagatcaagcatgggcgaattacagactggtgttgagaaacttaacgcggggataaatagtccacaagcagatgcaatttcaaaacaagtaacaacagacttaacggcagtagcaactgatgctacaagtacaggacaatcattacaacaaattaatagtaaactatatgataaaaatgtaagtacaagtgcagctagtcaagttgctaacactggtgcgcaattacaagctattacagaagtagtttctgatccacaaattaaagcagcattatcaaaagatccagctttagcacagaaactaaataatgcacttcaaagtgcggggactagtgttactgctacagctaatcaacttgcctcatctggtgcagatttaaatacgattaaaactaatactgaagatactggtgtacatctaaaatcagttcaaacgcagatgactaacttaatgacaagtcttcaagcattgaaaaaaggtgtaaatgaattatatgttgcagcacctcaacttaaatcgggcgtagatcaagcaattgatgaattaacaggtggtttaaaaactgttagcgcaggtttaactaaaactagtgataaaccttcagatatgggggctatccaagcaacagatactatcaatgcaggcttaagacaaattaaattaggccttgttgggactccgagtcaactaggcttaattccaggattaagcgcctatacagctggcgtatcaaaagcaagtgatgggacaaacgagttaaatagtaaggtaccagcgttgacaagcggtgttggacaattagcaacaggttcaaaagccttgtatgctggtacaacacaactaaacggtcaagtgccacaattgacaagcggtgttggacaattagcaacaggttcaaaagccttgtatgctggtacaacgcaattaaacggtcaagtaccacaattgacaagcggtgttggtcaattagctgctggttcaaaacaattagcaactggtactggtcaattgaatagccaagtaccacaattaacaagtggtgttagtcaattggcaacaggttctgaaacattgaacggtggtcttggtcaattaaacgctaagatcccaacgttaacgagtggtgttggtcaattagccgatggtacaagtcaattagctgctaactcagctaagttaaacgacggtgctggtcagttaactgatggtaacaagacattagcaactgcccttaagggtggcgcaaaacaagttaacgatatccaattaacgaataagacagcggatatgttcgctgcacctgctgaattgaaacattcaaactatagctatgtgcctaactacggtcatgctttagcaccttacgttctttcattagcattgttcgttggcgcaattgtcttcaactttgcttatccaattcggaagatctcaatgactggtcaatcatcaacagcatggttcttaagtaaaatcacggttggcgctttagtcgctgtcgggatggcaattatcgaacctgccttaatgatggttgctggattaaacgtcgatcatccagcacaattcttcctaatggcaattaccttctcacttgcttcgatgtcgatcattatgttcttatcaatgacatttgataatcctggtcgtttcttagcaatggtcctcttgatgcttcaattagggggttcaggtggtacattcccaatggaaatcacgaaccacttctacaacgtcattcacccattcttaccaatgacgtattcaattctagggctcagagaagcaattacatctggtttaggtaccggtcaaattgttcaatcattctttgttctcttagccttcatcgtcgtagcactcttgctattatggttaggaatgaatcatttacaaaaaatcggcaacggtggtcgctcacaattagacgacaaccaaaaattacaagatgtcgaaaaataatcactagaaaaagcctgtcagctaaatgctggcaggctttttttagtgcaattaagtattcttaacgtctaagaatgtataaccgcggcgatcataacggttgcgacttcttgagtattcaatcggttggccattatcgagataaacaacttgttcaacttctaagacgggatcagttggggcgcagtccagatattgctggtcatattcatcggccttgtcggcttgaatattgcgaaaggcacccgcgaacgtgaggtgtagggtctccttaaggtaggtgtagattgactgtgcgagaacatcatcagttaatccgggaactagactcactggcatgtaggtatgttcgaggacgctattaacgccgtcgataatccgcagtcgaatgattttgtagacgggctgttgatcagcaagcattaagcgatctttaatctcaggcgttgggaaagtcacctcaaacgtgatgaccttacttgagagtgttttaccaatgtcggctaagtcgcgtgacatcccacggtattgatccgctggtgccgttgatttattccaaaaagagtggtctaacacctttgtaccagcgccgcgtcgtgatagaacgagtccttccatcgttaaaatcgtgattgcttttttgatcgtcattcgactagcatcgaattcttgaactaagtcggtttgattgggtaacaacgtattagcaggatagcgcccttgtttaatccgttgtcgaataatgttggcaatttcttcgtattttggcaaaaaaaataccccgctttctacttatagtttagtggaaacaacggggtaaaacaatctttagtttgccagaggatcttgcagatgcttttttcaaccgttcattcttagatcctgccgtgaagggggaattccccgctgatttagtcgcgattttaaaagatctagccatcttacctgactatcaaccagctgacttagcattgattaaggcgaacactgtggatttattggggattaattattatcaaccacggcgcgtgaaggccaaggaaaccccaatcgaccatacaaacggcccgatgccggatgattttttcgacaattacgatatgccgggtaagaaagtcaatccgtatcgcgggtgggaaatctacgaacgtgggatttacgatattttgaaaaacgttcgcgaaaactacggcaacattgcttgctttatttcggaaaacgggatgggcgttgaaggcgaagaacgttatcgcaatgcggatggccagattaatgatgactaccggattgaatttgtacaggatcatttgaagtatgtccatcaagcccttcaagaaggcagcaactgtctcggttatcatatgtggacgtgtatggataactggtcatggaccaacgcctataagaaccgctacggttttattgcggtggacttagaccatgattgccaacgggcgattaaaaaatcaggtcattggttcaagcaagtcgctgatcaaaatgggtttgaagcctaatcgaattgaaaaagcacaatcgacgaaacaatcgttgattgtgcttttttgtctgttatattcgggtaaacttgataaccatcaagttcttaaaatcggctttcttctatactaaagacaatcgttaggaagaagggattttaaatgaaatttcaaagatggttacaatccgtgaagaatcagattgcgctgactgttggcggattgattgcagtggcctatagctggtattggcttggtggggcggtaattgtgatgcaagggctgttattggttgcgtcaatgatgggggttgcaccgattttgatgcaggcgtatcaagcgctaaaagtgaaagtcatcagcattgatttgctggtcacgattgcggtattgggagcgctaatcattggtgagttcaatgaatcggcgattgtcacgttcctctttttattcgggagctatcttgaacaacgaaccttgaaaaagacacgagaatcaattcgcgcattgtctgaaatggcgccacaaacggcacaagtgttagcggccgatggcactactacgacggtagatgttgatgatgtcgaaatcgatgatcaagtattggttaaagctggcgctcaggtgccggttgatgggcaagtcgtccaaggtagtgcctatgtcaatgaagctagcatcactggcgaagcacaactcgttaagaaaatagtgggtgatgctgtttattccggggcaattgtggataacgggacattgacggttaccgcaacgcaggttggggatgatacaacttttgcccaaattattgaattggttgaagaggcccaagatagtaagtcacccgcggaaaaattcattgatcgttttgcgacgtattacacaccggccgttttagtgttggcattagcgattggcttaatcacgcgcgactttaaactcgcgattacgattctggtgcttggttgtccaggtgcgctagtaattggtgcgccagtttcaatcgtggcggggattggcaatggcgcgaagcatggggttttgattaaaggcggcgaagtcgttaatgcgatggctggcattgatacgatggtctttgataaaactgggacattgactaaaggggacacggcagttgcacatgtgcaattttatacagcggcagaacaagcaacgttggcagtgactaccgcggttgaagcacagtcagatcatccactggcgactgcgattgtgcagtatgcacgggaacgaggggtgacagacttaccaactattgaacgaattgaaacgctcaaagggttgggggtacaagctgaagtcgctggtcaaacaattcggattgggcgggccaagatgatgactgaagcagggatccggttaaccggtgcgcagattgcggcgatcacggccagtcaaacagcagggcaatcaaccgtgttagtcgcagttgaccaacaagttgttttattaattgggattgctgatacggttaaaccggaagccaaggcagcattaacgcgtttgaaaaaagcgggcgttaaacatttagtcatgttgacgggcgataatgaccagacggccgcagcaattgccaaagccgtcgggattactgaataccacgcgaatcttttgccggcagagaaggttgaattcattaagacctaccaagcaaacggtcaaaaagtggcttttatcggggatgggattaatgatagtccttcgcttgcactggctgacattggaattgcgatgggttctgggacagatgtcgcgattgagacatccgatattgtgttaatgcaatcgacgttatccgaattagtgtatgccgattacctcacgaaggcgacggcacgtaatacagttcaaaatattgtgattgctgttggaacggtcggattgttattgcttggcctgatgcttggctgggtacagatggctagtgggatgtttgttcatgagattagtattctggtcgtgattttcaatgcgatgcgcctgattcggtttaaagttcgctaaacttgatggcggtcaatttttaatcatgcagcgcgcgatatagtaacagtaatcaaacgaaaaggtggtcattgaaatggcaaaattggtgatgcaattagacgagctatcatgtccgtcatgtatgcaaaagattcaagcgggtgtcagtcaacaagatggggttgaatcagtgaaagttctctttaatgctagtaaagtgaaagcagaatacgatgaagccgtgacaaacccagatgaattaacacaagctgtaactgacttgggctacagcgttcaaagtatcaaagtgaaatagggggcaattaatatgttatctaatgaagaaatcgaaacacgttaccaagcagaagttaaacaagctgatgttgatcaccatacaccaaccgcgggtgccatgatcggccatgtgatggctaacttaacgattcaacggcgtaaactccgtcaaatgaagtggtacgctaaaggaatcaataaccaagcttttaaagcgcaattaaccacattgcttgcagaaaatgatatgctattagacaagacggccgaacggctactagacgaaggtgaagtgcttccgacgacgcaagctgagtataccgagtatgggatgctgacagaagagccgcggattaagtactgggagatgccagcgatgattgcggaaatggttgcggactataatactgctaatctatttgtttcccgtgcgattaaacttgcggaaaaagaagaacgatttgctttagcggcggatatggtttctttaatgggctacaaccaacaccaaatccgtgaattgcaaagccaactaggaaaagcagcgcgcgaaggattagatgaagaagacgacgattaagatagagggaagtgggctaggtgactgacgaacaacatatttgtgctgagatagtaccgatttttaatcatttagaccgtgatagtttggtcaagatttcggcagttacccatcatgaacgcgttaaaaaagggacgttggtgatgagcccgatagatcagaagcggttagtgatcttagctaaggggagcattaaggtctatcagctctctacagcaggcaaagagcaactgctacgcatgatggaacccggtgattttgaaggagaaaagttactttttaaaacggaagatgagccgttgtacggtgaggtcttgcaagatagtacaatctgtacgttatcgcggagtgattttcaacagttactgttagcctatcccgaaattagtttaaagttactagaagcaactactgataagatgacgcgtttggaaaaacaggcgaacttaatcaatatcgagtcagttgaatccagaatcgtgacttatctacttgatttagctaaagcgagcggagaaactgaagtgatgattccgatgaagttaaaagaactggcaacatatattggaacaacgcctgaaaccttatcgcgtaagttaaaacagttagaaagtcatgcgctaattgaacgaaacggtcgaaagattgcgatattagactatgaaaacctagaagacttctattaggacgtgaagattctgcgaattttgcaggatctttttgtttacctataccaatttggataaaattggaacaaatagcagtttaaaagtattatgagggataatcaatagcgcagattagggatgagaatccgggtgatatgaattattttttcgatatttatacaggaattcaatttttttgaatttttttcaaattagtgattgacgttgtcccactaggatggtaagatattctatgtcgtcgagagatgagcatgtagcaaaacgttgaatgaatattacttaaaaaaagttgttgacattcgggtttatacatgataagatagattgtgttgcttatgagttttaacttaataagtgattaactaatatctgatgtagactgtccaaaaaattttgagacagtggctaacttgattctaaaatgcgcggctgagaaaaacaacgattaaccgccataaaaacgggttacttattggtgccgtttgtgtcgtctgcgctatcgcaattcctcttgtacttgctgcctattacctattctaaaaaagaccaatcataatgaaaattcattatgattggtcttttaattttggaaattaacgtttcttagttgctttcttacgtgctttagcaagtgctttttcacgatcacgcttttctttttccttggcttcgcgttcgcggcgaatcttaaatggattttgaatcaccattgtttgacccactgaaaaggcgttcgttaccacccagtaaattgaaacagcagacgcgatgttcatggccatcacaaaaatcatgattggcatcacccacaacattgcggatgacgcagcattcttcgtgggttgcgacatcattgttagatacgatgttgcaaatgtaaagatcgcagccaagatagccataataaagtaaggatcagctttcccaagttgcatccataagaacgtcccactctttaaagcagctgttcgatagattgcttggtacaaggcaatcaacactggcatttgaaccactaatggtaaacagcccacaactggattgacgcccgcttcagcatatagcttttgcgtttcttcgcgtaacttctgttgtgtctcagcatctttagaagcatatttcttttgaagtgcttgaatttctggtgcaacttcttgttgtttgagcatgctcttactttgccaccaagttaatggcaagataatcacccgaatgatgatggtgaaggccacaattgcccaaccataactgccaccaaagatgtctgctaaccataaaataaagcgggagaagttataaataacataatgatcccagaagccagtactgctactatcaactggtgatgtactacaccccgctgcgattagcatgaacaagaatagactggccactaataatagccgtttgcgattttttgaactcactgtaatccctcacttattcagaagcagaatctgcttcttcctttaatagctttgctagttttaagacgtgcattaaattctgtttggtttccgccattgttagttggttagcgccgcgtcttgcgatcactaaaaagtcgacagtctgtggtaactctggcttcaactccaacaagctctggcgaatgtaacgtttaacctgattacgcatcactgcgttacccacttttttacctacggacaggcccacccgaaaatgcttttgaccaggtttttctaattgataaaccacaaaattgcggttggcaactgaatgacctgcttcaaaaaccgtttggaaatcctgttcttttttgacgcggtacgactttctcataattcactccggcatttcatttaattaattgaggataataaaaaaaccactgaagcatcagtggcctatgcagataatacttttctgcctttagcacggcgtcttgcaagtaccttgcgaccgttcttagtattcatacgtttcatgaaaccatgaacacgttctttatggcgtttctttggttggaaagttctctttgtagtcattatactggcacctcctaattgactgtgtctattgttttcatatctgagaaacaacgggtgataaataccacctacgacattcactaaaatataatagcatatttctatagaagttaaaacactttccataaaaaaacagaataaatattcttatccacaaaaaaaataattcattggctttcttgtggataactgattataccgaatcgtccgatttttgtcacgcacagattacttgctgatttatccagaaaatcacagggtgttactatgttatccacaagctattttcaagctgtgcacaaattgataaaaccttttaatagcaagcatcagatacacacacttttttgtggataagtgcgataatcgtttgttgttttctgttttccacagtccccactaaaagttatccccggtcgtgtgttcaagtggataactttttaattcattcctgtggattttgttcttgttgtggaaaacttttttttagaatgctagaatgtagatagtctttctttattgaactttttttcaataaagtggttattttacgtgaggaggacacgctacatgcctgatcttcaggaactttggaactatttgcgggaagaattccaaaatgatttaacacccgtcggttttaatgcttggattaaaaccgccaaaccgcttgcttttagagccaatgaaatactgatcgaagtgccttctcccttacacaaagagtattgggaaagtaacttggccactaaggtcgttgaaggggcctacgaattcgcagagattgaattgacccctatttttctgttacctaccgaagccgagcagcttcaagctgaaaaaccagctgaagaacgcagcctcaccaaagctgaaaccccaacctttttacgtgaaacgcatttaaatagtaaatacacgttcgacacgtttgtgactgggaaaggcaatcagatggcccacgctgcagcactcgttgtttcagaagaacccggtgttttatataatccactttttttatacggtggagttggtttaggtaaaacccatttgatgcaagctatcggtcaccagctgttactctctaaacctgacacgaacgtcaagtatgtgacgagtgaagcttttgccaacgacttcatcaattcgattcaaacgaagaatcaagaaaaattccgccaagaataccgaaacgttgatttattattggtcgatgatattcaattttttgcggataaagaagggactcaggaagagtttttccataccttcaatgatctctacaatgataaaaagcaaattgtcttaacatctgatcgtttacctaatgaaattcccaagctccaagaacgcttagtttcacggtttaaatggggcttgtccgtcgacattacgccgcctgatctggaaactcgaattgctattttacggaacaaagccgacacagaacgcctcgaaatcccagaagatactttgagctacatcgctggtcaaattgattccaacgtccgtgaacttgaaggttcactggttcgggttcaagcttatgcaaccatgcaaaatgctgaaattacaactagtcttgccgccgatgcccttaaaggcttgaaactcaatgggaagtcgagtcaactttcaattgctaagattcaatccgtagtcgctaagtactacagcctttcaatcactgatttaaaagggcgcaagcgcgttaaagaaattgtgctcccacggcaaatcgctatgtacttggcccgcgaaatgaccgacagttctcttcccaaaattggacaagaatttggcggtaaagatcatacaacagttatgcacgctcatgaacgaattagccaagctttaacgagtgatcaaaatctaaaagatgccatcttagatttgaagaataccttaaaaggctaaatataggctgtggataaacgctaaagttatcctaagagttgttctcaacttatccacaagtggaaaactagacactcttttgcttttctatgttatccacaggttccacaggccctactactattacttaaaattcttttataatatatatatctattttccttcggaggtttaacatccatgaaattctcaattaaccgcaacgtgttcatcaaaacccttaatgatgttcaacgtgccatttcagctaaaacaacgattcctattttgacggggcttaaattagtgctttcgcaagaaggcttaaccttaaccggtagtgatgctgatatttcaattgaagcaacccttgctagtaatgatgaaaagaatcaattagtcgttgaagaagcaggtgccattgttttaccagcccgcttctttagtgaaatcgttaaaaaattacctgaagatcaaatgacgattgctgttggtgacaacttccaaacaaccattcgttcaggtaaatcagaatttacaattaatggcttagatgctaatagttatccacatctacctgaaattgcgggacaaaatccgttcagtatcagtactgatgtgcttaaacaattaattcatcaaaccgtcatcgctgtttctaaccaagaaagtcgcccaatcttaacgggggttcatttggttttaaaagatggcgaaatgttagccgtcgcaacggacagtcatcgacttgcacaacgaaaattaaccgtttcagtaccaagtgatgggaactacgatgtcattattcctgggaagagtttaattgaactttcaagaacgttagcagacgaagttgaaaccgttgaaattcggattgctgaaaaccaagtgctctttaaagccggtaacttagccttttattctcggttgttagaaggaaattaccctgacacagcacgtttaattccaacttcttcaagtacacaaatcgaattcgatgcaccggtcttattagctgcgattgaacgggcatcattgttgtctcatgaaagtcggaacaatgttgtccggttgacattgaatacaacggacaacacggcaatcatctacgggaactcaccggacgttgggaatgttgaagaagcccttcaatttgaaaacctaacgggcgaagatctcgaaatttcatttaacccagattatatgaaggatgctttacgttcatttggtcaaacaaccatcgtgattaactttacggcagctttacggccatttacattggtcccaagtgaagatcaagaacactacattcaattaatcacaccagttcggacattttaataatcaaaaaacgccgcatttaaaaatggggcgtttttttttgcgctaaaattaaaataaattcgtttacagcgatttcggataaaacaagtaggataaggttaaagcacttaaaaacgctcagaaagcattttagctgtgtttatttgtttttaaggcaaaaaaagtctataattgtaaggtataacagatcggtattagcgcagtaattaatatcgttaagaatggtgggttgagtatggcacaagaaattaaacttgaagctgagtttgtgacactcgggcaactccttaaagaggccggtgtgattgaaacaggtgggcaagcaaaatggtttttaaaagaaacaacggttttagtgaacggagaacctgatgatcgtcgcggccggaagttatatccggaagacgtcgttgaggtgcccgataacggccagtttgtcattaaacaacaagaaagattgtaggcgactatgtatttaagtgaactccaacttgatcattatcggaattacgagcaagtggacgtccatttctcgccagatatcaatgtcttgattggtgaaaatgcgcagggcaaaacgaacttgctagaagccatctatgtgttggctttggctcgttcgcatcggacgaataatgatcgtgaactgatacaatgggatggcgaattcgcaaagattaccggcttggtacaacggcaaactggccacacaccattagaattggtggtcagtcaaaaaggtaaaaaagcgaaggtcaatcatttagaacaggctaagttatcccaatatatcggtcaattgaatgtcgtcttgtttgcaccggaggatttgaatatcgtgaaaggctcgccagctgtccgacgacgctttatcgatatggaattcggtcaaatgagtgcgaagtacctgtataacatttcgcaatacaagtcgattttgaaacagcggaatcagtatttgaagcaactacaacgacgtcaagctaaagatttagtgtatttaggcgtattgtccgaccagttagccgcttatggcgcggaagtcacggttgctcgccgtgaatttctgcaacagatggagaagtgggcgcagaagttgcatcaagagattaccaaagagcgggaagttttgacgtttaaataccaaagtcagattccagatgagcagttggtacttgatgccgaaggtttataccaacagtttcaaatcctatacgagtcgcaccaaacacgggaagtcgaacagggcacgacattggttggcccgcaccgcgacgacgtgttatttttggttaacggtaaggacgtgcaatcgtttggctctcaaggccaacagcgcacaaccgcgttaagtgttaaattggcggaaattgacctaatgaaggaacaaaccggtgaatatcccgtcctattactggacgatgtgttgtccgagcttgacgatttacgccaaacacacttattgaaaacgttccagaataaggtgcagacgttcttaacgacaactagtcttgaaaatgtcaaaaaagaaattattagtgcgccacgggtgtttaccgtgacaaacggcaccgtgacagtggccgatgcagcagcaaattagtcaaaaaacgatcaaacggaggtttttttcttggcagatgatcaaatgaatcaagagacagaagcacaaatggaagcaaaagaagaacgcgctaaatcttatgatgccagtcaaattcaggtgttagaaggcctagaagccgttcgtaaacgaccagggatgtacattgggacaacgagttcccaagggttgcatcatttggtttgggaaattattgataatgggattgatgaagcactcgctggttttgcaacagaaatcaacgtggttgttgaacccgataatagtattacagttacagatgatgggcgtgggattccagttgggattcaagctaagactggtaagtctgcgctcgaaaccgtctttacaatcctgcatgccggtgggaaattcggcggcggcggatacaaagtatctggtgggttgcatggtgttggggcttcggtcgttaatgccttgtcaacggaattagatgcggttgttactcaaggcggtaaacgctactacatcgatttcaagcgggggaaagtgcaaacgccaatgaagatgattggtgacgcaccagcccatgaacatggtacgaaagttcattttgtccctgatgctgatatctttactgaaacaacggtgtatgatgataaaattttaacaacgcggattcgggaattggccttcttaaacaaaggcttgaagttaacgttcaccgacaaacgggctgaaacacatgaaaaacttgaatttcactatgaaggtgggattaagagttacgttgaatatttagacgacaaaaaagagacccttttagacgaaccaatctatgttgaaggtgaacaaaacgggattaccgtggaagttgctttgcaatatacgaatgattatcggacgaacttgatgacctttgccaataacattcatacctacgaaggtgggactcatgaatctggctttaagacggcgctcacgcgggttattaatgactacgcaaccaagcaaaacatcttaaaagccaacgacacgaacctttctggggaagatgtgcgtgaaggcttaacagcggttgtctcggttaaacatccggatcctcaatttgaaggtcaaacgaagacgaaattaggcaatgccgacgcacggacggtgactgatcggatgttctctgatcatttcacgaagttcttgatggaaaacccatcgattgcccgccaaattgtcgacaaaggctcattggctgccaaagcccggttagctgctaaacgcgctcgtgaagtgacacggaagaagaacggtcttgaaatctcaaacttgccaggtaagttggccgataatagtagtaaagatcctgctatttcagaattattcatcgtcgaaggggattccgctgggggttcagcaaaatcaggccgttcacgtttaacgcaagccatcttgccaattcgggggaaaatcctgaatgttgaaaaagctagcatggaaaaaatcttggcgaatgatgaaatccggaccttatttacagcaatgggcactggttttggccaagaattcgatgtggctaaagcccgttatcataagttgatcatcatgaccgatgccgatgtcgatggtgcgcatattcggacgttgcttttaacgttgttctaccgttacatgcgaccaatcgtcgaagcgggttacgtgtatatcgcacaaccacctttgtaccgtgttaaacaagggaagatgatgcgctatattgattctgatgaagaattacaagaagtgttagggacgctccaaccaagtcctaaacctgaagtgcaacgttacaaagggttaggggaaatggatgctagccaattatgggaaacaaccatggatcctgaaaaccggcgcatgttgcgggttaacgttgaagatgccgaagaagcggatcaaatttttgaaatgttaatgggcgatcgggttgaacctcgtcggattttcattgaagaaaatgccgtttacatggatccaaagagcatcgatgcatagcgtgttcgccgcttaaacggacacattgaaagactgactgagaggggtttatagattaatggcaaacgaaattggccaagacggtcggattgaaaacgtcaatttatctaagacaatgcgtaaatcattcctggaatatgcaatgagtgtcattgttgcgcgtgccttaccagacgttcgtgatgggttaaaacctgttcaacgccgaattttatacggaatgaatgaattaggggtcactcccgaaaagccttacaagaaatctgccagaattgttggggatgttatggggaagtaccatccacatggtgattcagcgatttatgaagcaatggtgcggatggcacaagattttagttatcgttacatgttagtggatggtcatgggaatttcggctctgtcgatggtgatggtgctgccgcaatgcggtacaccgaagctcggatgagcaagatggctgtcgaaatgttacgtgatatcaataagaatacaattgattatgtaccgaattatgatgagtcagaacgcgaacccgctgttttaccagcccgtttcccgaacctactcgtcaacggggcgactgggattgccgttgggatgacaaccaatattccaccgcacaatttagccgaagtgattagcgcattacacatcttgatggataatccagatgcgacaaccgctgatttgatggatgccttacctggccctgattttccaactggtgggttagtgatgggtaaatctggtattcgccatgcgtatgaatctggtaaagggacaatcacccttcgcgctaaagtggacgttgaggtccaaaagaacggcaaagaacggattattgtcactgaaattccatacatggttaataaggccaagttggtcgaacggattgctgaattagcccgtgacaaacggcttgaagggattaccgatttaaacgatgaatctgatcgtgatgggatgcgcatcgtaatcgatgtgcgtcgggatatgagtgcttcagttgtcttgaataacctgtacaaattgacaccattacaaacctcattctcatttaatatggtggccatcgtgaatggtgcccctaaagtcttgagtttgaaatcaatcttggaacactacttagtgcaccaagaagaagtcattcgtcggcggactgaatttgatttgaagaaggccgaagcgcgggcgcacattttagctgggttacgcattgctttagaccatatcgatgcgattattcagatcattcgtggttcgaatacaggtgatgccgctaaggtcttgttgatggatcgttatgatttatcggataaacaagcgcaagccatcttggatatgcgtttagttcgattaaccggtttggaacgtgataaagtcgaaaatgaatacaataatttgatgactttaattgctgatttgaaagatattttagccaaaccagaacgcattaagaagattatctacgatgaattgcttgaactccaaagtaaattcggtgacaaacgccggacagaattattggtgggtgaagtgcttagtcttgaagacgaagacttaatcgaagaagaagacgttgtgattgcattaacgcataacggctacattaaacgattaccagccagcgaattcaaagttcaaaatcgtggtggtcgtgggattcaaggaatgggcgtccatgatgacgacttcatcgaacacttgctttcgacttcgactcatgaagtgctcttattcttcaccaatactgggaaagtttaccgtgccaaagggtatgaaattccagaatatgggcggactgctaagggaattccaatcattaacttattaggcattaattctgatgaacgcgttcagaccatggttaatgttggtaaagaagtgcaagacgaacaatcactcttctttattacccgcttagggacggtcaaacggacatccgtttctgaattcgccaatatccgtagcaatgggttgaaagcattgaccttgcgggaagaggatgaattaagtaacgtcttgatgactgatgggcaacaaaatatctttatcgggacccataatggttatgctgtgtcatttagtgagacagctgtccgttcgatggggagaaccgctgctggtgtgcgtgggattcggttacgtgaaggcgactatgtggttggctctgacttactgattccgggtcaagaaatccttgttatctctgaaaaagggtacggcaaacggacaccggttgcagattacccaatcaagggtcgtggtggtaaagggattaagactgccaacatcactgaaaagaacggcccattagctgggattgctgccgtcactggagaagaggatattctcttaatcactgatactggcgtcttgattcgtttcaaggtcgctaacgtttcacaaactggccgggccacacttggtgtgcgtttaatccgggtggatgacgaagcgaaggtcgcaacaatggcgaaagtcgaagctgaaccagatgaacctgaaacaccagaagcaacgacggcaccaatagcaccaactgatgacactactgatactggcttagcacaagtcgatgaattactcgcgcgggctgaagccgatcaatcggcatcagatgatcaagattcagaaaattaattaaattaaaaaaataaaaatcgtttctgcgtaaatacacttgtaacaactgttaccaagcgtgttagcagcaacgatttttattttagattgtattttaacggccgttatgatagaattttatcttgtgagtatctgtgatttagacacagggtctaaatcgtgaggctaatttttattagtcagttactccttgttcttacacaggtaagaacctaaagtccataaggaggtgaacagtcatggctcaatcaaaatacgaagttacttacatcatctcaacaacacttgatgaagaaagtaaaacagctcttgtcaaccgttacgacggcatcttaaaagacaacggcgctgaagtgattgattcaaaagactggtcaaaacgtcgtttagcttatgaaatcaacaatcaacacgaaggcatttaccatatcgtaaatgttttagctgataatgatgaagctttaaacgaatttgatcgtctagctaagattgatggctcagtattacgccatatgatcgttaaacgcgaagactaattttgaattgtaattattgaatagaggggagctgacagaatgattaatcgagttgtactcgttggtcggctaacacgcgatgttgacttacgttacacttctagtggtgctgctgttgggactttctcaatcgcagtgaaccgtcaattcacgaatgccaatggtgatcgtgaagcagactttatcaactgtgtcatctggcgtaaatcagcggaaaatttcgctaatttcactaagaaaggctcactagtcggagttgatggccgtctacaaacgagaaattatgaaaaccaacaaggtcaacgtgtatacgtaaccgaagtggtcgttgataacttctcattgttagaatcacggacaacaacggagcaacggcaaggggatggcgcaagccaaaactttaacaacaatcaaagcaatggtagccaacaatctggatttaccagccctcaacaatcgggtaatccatcagctgcaaataacactcaagccgatccatttgcaaataatggtcaagcaattgatatttcagatgatgatttacctttctaaaataaactgttttggaaggaggaactttcaatggctcaacaaagaagaggcggcaaccgtcgtcgtcgtaaggttgatttcatcgctgctaaccacatcgaatatatcgactacaaagacactgatttattgaaacgttttatctcagaacgcggtaagattttacctcgtcgggtatctggtacaagtgctaaaaaccaacgtcgtttgacaattgcaatcaaacgcgcacggattatgggcttattaccattcgttacagaagactaatcagtcaaccaaaagacctgctaaacactgtttagcaggtctttttttgtgcgctttaataggggaacatgggattaaattacgggttcaaagcggtaattgtagggcaattgtgctaaaataaaagtagcattttttaagttttagtaaagaaccacatagactcaatgatagatgaacaagaatcagaatgggatctagaattaaggagtttacatgaaaaataagtttaaacaattaaaattaccacagtttttagatgatactcgcctgcggaccgttgccctgattttgttgggccttacagcggttagtttggtatttgctgcgatgttagattggctaattgctctaattttattcgtgctgctaatcgggacggtcattactgtgctatacgcgatcgaaacggtcactgagaatacagccaagtatgtctcggacttgtcgtaccgcattaagcgcggcgagcaagaggctttaattaagatgccaattgggattttattgtacaacgaatcaggtgagattcaatggacgaatccttatttacagcaatatttcggtaataaagaagttttaggcaaaaagattaagtctgtcgatccagagttggcagaattagtcgcacaaaatgaagatgctaatgaaacaaaaattgttcgttggggcgataatcaattccaaatcattatccaagaaagcattggggtggtttatcttctcgatattacacgctatgcggccattgaagatcgttatgaagatgagcaagtagccatcgggcaagtgttcttagataattatgatgaaatcactcagacaatggatgatcaatctgtttctaatctgaataactatgtcaccaacgagttatcacgctgggcgaatcagtttcagatgttcttgaagcgagttgatgatgatcatttctttgttttggcgtacgccaaatcattacacgccgctgaacaagagaagtttaagattttagatgaaattcgagaagaaacatccaaacaaaacttcccactaacgttgagtgttgggtttgcttatggggaatccgatttagccgttctagcaacaacttcacagagcaatttggatcttgccctcggtcgtggtggtgaccaagtcgttgtcaaagcgagtgaaggacaagcacgtttttatggtggtaagactaatccgatggaaaaacggacgcgggttcgtgcacggatgatttcacaagccttacaagaaatcttcaaacaagttgacgaagtctttgttatgggccatattcggccagatatggatgcattgggcgcctcatttgggattcgccggattgccgagatgaacggtaagaagtgctacgtggtcgttgaccaaaacaatattcatacagatattcaacgtcttttagaggaagttaaagcctaccctgaaattgcagtggaagtgttgtcgcctgaagaagcgctcgaaaaagcaacggccaatagtttattagtgatggtcgatcattctaaaccatccataacaatggcgcctaagttgtacgagaagcttgctcagcggacgattgtcatcgatcaccatcgtcgtggggaagagttcccagaaaacccaatgttggtttatatcgagccctacgcctcttcaacgtgtgagttagtgacggaaatgtttgaatatcaaccacaaaatgtcgctaatattaacaagttcgaagccacaacgatgttggctgggattacggttgatacgcagtcattttcaatgcgaactgggacgcgaacgtttgacgcagctagttatttacgttcagttggggctgatgcttcgatggttcaacacttgttaaaagaaaatgtcgataattatattcaaaagaatcatttaattgaaaccattgaaatggttgagccaaatatggcattatgtatgggtgaggacaaccgtacctacgatccggtcatcgcagcacaagcagcggataccttgctgtcattgtcagacattgaagcctcgtttgtcattgtgaaacgcccagatggcatgattgccatttcagcgcggagtctaggtgatgtgaatgtgcaagtgattatggagaaattaggtggcggtggtcatctttccaatgcggcaacgcagatggcagatacgactgtttccgaagccaaggcgaagttattaacggttttggcagagctatttgatccggaaacggacaaggaagcaacaaacgattaattagataaggtggtcagaacaatgaaagttattttcttagaagatgtacgcggtaaaggtaaaaaaggccaagtgaaagatgtgccagatggttacgcacaaaactttttaattaaaaatgggaaagcaaaacccgcaacatcagctgctatcagtgctttaaaaggccaacaacatgctgaagctaaaaatgcagctgctgaattagcggaagcaaaggttttaaaagccaaaattgaagacgataaaacaatcgttgaaatcaaatctaaagcgggcgaagacagtcgcttatttggttcaattccaagtaagcaaattgcccaagcattggctcaacaatatcagatcaatgttgataaacggaaaattgatttaccagaaccaatcaaagcgttgggttaccggaatgttgatgtacggattcaccctgatgtaacagctacgattcgtgtgcatatcgtaaccgaataataaaatgaatgattgaaaagaccgtgattagcaccactatcacggctttttttattgctgaccaatcggtgactgttgccagtcactggtattttgagtaaactagtgagtaattgaagtcgattaaccaaaggagtaaaaatggtgaataatgaactaattgaacaagtaccgccgcagaataatgaggcggaacaggccgttttaggggccgtctttattagtggcgatgcgctcgttgaagcaatggaatacgttactgccgacgatttttatcgtaaagcccaccgtttgatcttcgagacgatggttgaattaaacgaacggggtgaaggaatcgatgcggtgactttaaagagtgccctcgatgcgcagaaccaattggaagatatcggtggtattggttatttagctgagttggctgaggctgtaccaacggcagccaacgtagtttattatgccaagattgtctctgaaaaagcaatgctgcgccgtttaatccaaaccgctcaaaatattgtggcaaagggttacgcgcaagatgaagacgtcacggatattttagataccgctgaaaaggaaatcatggatgtttccgaacggcaaaataaggccgggttcaaatcaatttcagatgtcttaacgagttcaattgaacaaattgataagttatatcaaaatgaagaagacattacgggtctatcaacgggataccgcgatttagataagattactgcgggtttgcatgaagatgaactcattattttagcggcccggcccggggtggggaaaaccgcgtttgtcttaaacattgctcagaatatcgggacgaaaaccaatgagaatattgcaatttttagtttggaaatgggtgctgaacaactcgttaaccggatgttgtgtgcagaaggaagtattgacgccaaccatctaagaaccgggcaactcgacgaacttgaatggcagaatctaatcgtagccatggggagcctttcaaaagcgaatatctatattgatgatacgcccggcgtgaaaatggcggaaattcgggcgaaatgtcggcgcttagcgaaggaaaaagggggcgttggcttaatcgtcattgattacttgcaactaattgaaggttccggccaagaaaaccggcaacaagaagtctcggcgatttcacgtcaattaaagaaattggctaaagaattacgggtaccggtcattgcgctctctcaactctctcgtggggttgaacaacgacaagataaacgcccagtcctttcagatattcgtgaatcaggatcaatcgaacaagatgctgatatcgttgctttcttatatcgtgatgattactatcgcgatgaacctggggaagatggcgatgatttcggtggtggcaatccgccagcaccagcgccacagcagtcagatgatgcggacgttggagaagttgaagtgattatcgaaaaaaaccgtgcgggtgcacgagggacagtcaaattattatttgtcaaaacgtttaataagttctcatcaatttcgtatgcggaccaatagtaatgactatttttaataaatagtgaatattatcgtaaatgaaatacttaaaaaagccatcataattaaagtaaaaactttaattatgatgatttttttgatgggcatattaactgatattcgttaattagatgacaataatgggagggagaaatagaatgataacatcgttactttagttttatgagaatattctaaagatatttaaaaatttatttatatccaaaaatagttaatataatgcgaatctatagtgaatttcaattaatattaacattgttttccgtggctatggatggcattgttgtgttaagcactgaatgggcaactttttaccaaacacttacgcaaacatcgattacgattattgctaatgcggttgaactacctaagcaatacaaataccatagtcagtctaaacaaattatcacactggggcgcttaggcgaacgtaagggcacctacgatattctaaaattagcaggggtgattcaatcccgttttccggatattcaatttacgttgtatggtgatggtgaacaggggaaggtccagcaagaaatagaccgcctaaagttaaccaatgtgcgccttggtggctggttagctttggcggatcgcaataccgttattcaagaaagcctgttacacctattgccctcatatcaagaaggcttaccaagggcaattttagaaacgatggcttatggaattcccaatttagctacgaatgtcggggacattccacaagtaattgagaatcatgtgagcggggatttggtgacaccaggagatgacgctggcttagttcaacaactcagtgattttctaggtagtcagatgcgacgtgaaacatattcacgaaatgcccggcaaacgattaacgactgtttctcattgcaacagtattttagccggtggcaccagttttatcaaaggattatgaatgaaacggaggaggaatgatgaattctatagcgcaatcgactgataaattagagttgattaatttctatcatgagatggctcaaatttcagcaaacattagtcaaattttaaatgaagacggagttaccatcgaacaaattcgtattttacaaacattaaaacgctataaaggtattaataatagtaagattgcacaagtattaaaaacatctaccgcagcatcttcaaataaattacgtaaattagaggatcaggggtatatcagcaaacaatatggcaaacaggatgatcggcgaattgttgatatagcagtttctcccgttggagaatcaatttatcgtcgatttgagcaggcgtgtgaaacttacattaaaagtattactgaatcagataagaaaattagcatgccagaattaatgcagctgtttgaaatgacaaatagacttgctagaagtattcggacaactgaaattgaatagacaaaaaaagtgcccacaaacggttaaatttgtaggcactttttttgatttatttttgttcagcatgttttgctgcaattaatgaacgatagttgaatagtaagtttaagataacagcgctgagactgccgactactaagccgttgcctagaattgtgcgaacactcgttggtagtgattggagcaaggttggatgaattgctacccctaagcctaagccgattgaaacggcagcgactagtaagttgcggttatcatcaagatcgactttgtgtaacatcttaatgccttgaatcccaacagtgccgaacataacgaccatcgcgccccctaaaacagcgcttggaataatggttgcaacggccccaatcttaggtaataatcctaagatgattaagaagaatgctgagtagtaaactggttttttcgttttgataccggataattgaacaatcccaacattttgtgagaacgttgagtaagggaaggtgttgaacaatccccctaagatagcggcaatcccttcagcgcggaagccccgcttaagatcattgctagtaatgtcgcgcccaacgatttcaccaagggcgaagaagacaccgattgattcaatcatggtcgttaacgcagccaatgacattgaaacgattgatgaccattcaaaacgaggtgttccgaagtagaataattcaggtaatttgaaccaacttgcttgacctactggatctaaggacacaatcccaatcgcagctgcgattaaggtcccagcaataatcccaattaaaatggcgatttgttggatgaagccacgcccccagatactaaaaatcaggattagggcaatcgtttaaaaaccggtaattaagtttggtgtactcccaaacgacttagcagcaacatcgccaccgcctaagttttggaaagcaacgggaatcaatgtgaatccgattaatgtaatgagagaccctgtgacaactggtgggaagagccaacgtaaacgtgcaaacaagccagaaactaacaagatgaaaattccggcgccaataatactaccgtacataacgtcaattccgagttggctgttagtgccgatggcggctaacgggccaacgtactcaacagcacaacctaggacaaccggtaatgcaatcccggtcagtggggttcgttttaattgtaatagggtcgcaaccccgcacatgaaaatatcgactgaaacgaggtaagtcatttgagcggcattaaaatgtaatgcagccccgacaagtaatggaattaaaacatcgccagaatacattgctagaagatgttgtaagccgagaatcgctgctttaatgtggggaagcttttcatttggattaattggctgtgctgaatttgagtgtatatctgccacgagtgtccctccaagataatcgttaaaatttagttaacatttagtttagcacacgccaatagtgacttcaattagaaattaagtaaaaaacgaatataacattcttaaataatcgcgatagttcgcctttgtgatgatgcacaccaactgttcgatgacaaaagtgctttcttactgaatgattcgcttgaaaaaggcgataattgttcttaaattaccgagtattatgtttcacatgaaacgataatctgaaaactgggaagaatcttgtttttttagggtaagtacgttaaactaaaaggtatatgtgaaacaataatgttccacgaattaaacgcctactttaaagcatagttaaggagaaataatgacaccagcgggttttgcagcaacgttaaaaacatacaatattcaagtttcacaagcacaaatggatcagtttgaattgtatttcaatcggcttgtacaagtgaaccaacaagttaatttgacagccattacagaacaagaagcagtttatctcaagcacttcttcgattctgtcacaccaactttgtatcttgaaaaactacgcactgaaccccttacgatctgcgatattggtgcgggcgcgggttttccatcgttaccaatcaaaattttattcccgcaattgaagattacaattgttgattcattaaacaagcggattcacttcttagaagaattggtccgtgaattaggcttgtctgatgtgacgttggtccatgatcgagcagaactgttcagcaacccgaagagtccatatcgtgaacagtttgatattgtgactgcccgggccgttgcttcattaaatgtactggtagaattctgtttaccaactgttaaagttggtgggcagtttatcgcattaaaagcgagtcaaggtgaaacggaattggcagaagccaactatgcaatcgaaacacttggtggccaatttgcacaagacattgctttgacgctaccagaaacagatgatcaacgacatctaatcgtaattgataaggttgtaccgacacctgccaagtatccacggcgggctggtgtgccagttaaaaaaccgttaatggctaaggaggaaaaataatggcactctcattttttaataagaaaaaagacgataaaagtattaatcaagtgatcaaagtaccggtttcagcaattgtgcctaaccggttccaaccacgaaaagtatttaatgcggacaatatcgccgaattagcaagcacaatcgaacaacacggcttattgcaaccgattatcttacgtgaatatgaagatcaaaaatatgaaattattgcgggtgaacgccgttttagagcgattcaaaccctcaaatgggctgaattaccagcgattgttcaaactatggatgatcacgaaacagcttcaatggccttgattgaaaacttacaacgcgaagaattaaccgccgttgaagaagcacaagcttataaggacttaatgaagctgaacgacttcacacaagctagcttggcagaaaagatgggtaagagccaatcttttgttgctaataagttgcggctattgaaactctcacaacccgttcaagaagccatcatgaatcatgaaatttctgaacgacacggtcggagccttttacggttggatgaattcaagcaacaaatgattttacaccaaatcttggctgaacaattaacggttaaggatacggaagcgctggttaacaagacgttgaatcctgaaccagaatcaactgaagagacagttgatgcaaccgatgacagtttaaaagaagctaccacgaaggctaaaaaagcgaacgataaagcaaaaaaagcaattgcccatgatacacgcattgccgtcaacaccatcaaaaagtcggttcaaatggttgaacaaagcgggattgccgtcaaagccaccgaagaagaacaagatgatgtttatcggattacgatcgaaattccaaagcaataagggaggctcattatggcacacgttatttcaattgcaaatcaaaaaggtggcgttggtaaaacaacgaccacgattaatctaggcgcttgtttggcggatgctggcaatcacgtgttaatcattgattcagatgcacaagggaatgcgacaagcgggattggggttcaaaaatcccaagtcgaaaaagatatctatgatgtgttggtcgatgaattcccactaaaagaaacaattattaaaacatcacataagaacttagacattgttccagctacgattcaacttgcaggggcagagatcgagctaacatcacagatggcgcgtgaaatgcgcttgaagttagggttagaaccagtcttagccgattatgattacgttttgattgactgtccaccttcattagggcaactttcaatcaatgcctttacggcaagtaattcaatcatgattccagttcaaagtgaatattatgccttagaaggattgagccaattgttaaacaccgttcgtttggtgcaaaaacattttaacccaaacttagcgattgaaggcgtgttgttgacgatgtatgatgcgcggacgaatttaggggctcaagtgattgaagaagtgcgtaagtattttggtgatcgggtttacgacacgattgtgccacggaatacgcgcttagcagaagcacctagtcatggcgtatcaatcattgattatgatccaaaatcacggggcgctgaagtttaccaaaatttggcaaaggaagtgttagcagctcatggcaactagaaatggaaaaggattgggccgcggtttggatgctgtattttcagcgttcgaaggccctaataaaaaccgggcggatgaattagttgaagagattgcacttgatgatattcgtccaaatccctatcaaccgcggaagacatttgatgaagcggctttggctgaattagcagcgtcaattaagaagtcgggcgttttccaaccaatcattgttcgcaaaagtattaatggttacgaattaattgcgggtgaacgccgattccgtgcgtctaagttagctggtaaaacagcgataccagccatcacgcggcagtttgatgaatccgcaatgatggaaattgcggtcttggaaaacctgcaacgtgaagatttaacgccgttagaagaagcccaagcttacgatacactcttgaaaaagttaaacctgactcaagctgaagtatcagaacggttgggcaagagccgcccatacattgccaattacttgcgcttattgggtttacccaatgacgtgaagacgttattacaaaatggtgacctttcaatgggacaggcgcggacgttattatcattgaagaaaaaaagtcagattagtgcattagcgaaacgcacgattgatgaaggcttaacggtgcgacaactagagcagttaattaaccagatgaaccagattaaagctgcgaaagtgacgaagaccaagattaaatcaccctatattcaagcgagtgaaaatcaattggtcgataaatttgacaccaaggtcaatattgcgattaacagcaagggtcgcggaaagattgagattgattacagcacagtcgatgatttaaaccggattcttgcattgctagatgtgaatatcgattaaagtgaggagtcgagctagatgtatacattaggcgatcttgttcagatgaaaaaacaacatgcctgtggcaccaatcgctttgaagtggtgcgcttggggatggatattcgaattaagtgcatggggtgcggccacgccgtcttattaccgcgccgtgaattcgaaaagaaacttaagaagaatttggtgcctgcagcagaagtcgttgttgcggatgaaccccactatcaagagatgcaacaaggtcccaaccaaactaatttttaaagtaaaggaaagtgtaaaaaactatgtcattaaccgcaggaattgtaggattacccaacgtcggaaaatcaacgttatttaacgccatcacgaaagcaggcgccgaaatggcgaactacccatttgccacaatcgaccctaacgtcggcatggttgaagtccctgacaagcgtttagaccggattcaagaaattatcccggctaaaaagatcgtgccaacgacttttgaatttacggatattgctgggatcgttaaaggggctagcaaaggtgaagggcttgggaacaagttcttggaaaatattcgtcaagtcgatgcgattgtgcatgttgtgcgcgcctttgacgacgataatattacctctgttaccggaactgttgacccgttagacgacatcgatacaattaaccttgaattgagcttagctgatttagaaagtgttacgaagcgttatgcgcgtgttgaaaagattgcgcggacgaaagacaaagacgccttagccgaattcgaagtgcttaaaaagattaagcctgttcttgaagaaggcggctcagtacgttcaatcgaatttaatgaagatgaagcgaagttagttaaaggcttcttcttattaacatcaaaaccggttttatatgttgcaaatattgctgaagatgccatggctgatcctgatagtgtggattatgttaaacaaattcaagcgtccgcagctaaagaaggcgccgaagtaattgccatctcagcaagaactgaagaagaaatcgcctcattagatgatgccgataaggctgaatttttggaagccgaaggggtgactgaatcagggttggataaattgattcgtgcttcatatcatctactaggcttagcaacattctttaccgctggtggaaaagaaacccgggcatggactttccgtcaaggcatgaaggccccacaaaccgccggtgtcattcattccgactttgaacgcggatttatccgggcagaaacagtttcttttgctgatttagatcaatacggttcaatgcaagctgttaaagaagctggccgtttacgtttagaaggtaaagaatacatggtcgaagatggcgacatcatcgaatttagatttaacgtttaatgataattgaggaggaagacaattggctaagaacgaacaaccagcagtaaccccagaaccagttgatattgaagggttagaagcaaaactcagtaagaaaaatgcggactatttatttaagttcaaacgcgcattaaatgccgaacaagtgccagcagaacgccaaactgaaatcttggcagaaatgttaccagaaatggtagcagaacaacataagggcaagcctgcaacacaagtatatggtccagtgacaaccaagattgatcaattgttgcacgcgccaaaacgtcctaagcaaacatcacttcaactccaaatgcttgataacggcttaatctttttaattatgtacctagcctttaacggaattgcggcttatttctcaacgaaggggtcagcaactagcattgggattacatcaattgtcattacggctgcgcttgcagggatcatcatgacttatccaatgcgctatacgcaaatgccaaaagaacaacggccaccattttggaagatggcattggttgtaatcggcttaacactagcctttgttgcggcatacggtgtgacaatcttgattccaagtttcttgaatccagtcttgccaccacttgttcaaatcgtaattgcagcactcttaatcggcgtgcggatttatatcaaacgccgttttaagattacaggttcattcttcggttaatattacccgggaaataaatggtaattgaggaggatttgagatgattagcactgaagaacggcaaattggggcagtcagtacgttgattgtggccccaagtggtcaagaaaaagcggtattaccaactgtctttgtatatcatggttggacgcaccgtaaagagtcagaattaatggtcgcccactttttagccaaggctggttttcgcgtggtcttaccagatgcgaagtatcatggtaaacgacatggtagtcagctcttttctgagttaatgtttgaattttgggatattgtgatgcagtcggtcaccgagtttggtgaactggttgcaacactgagtgctgaaggcttagttgatcctgaacggattggtgttacagggacttcgatgggtggcattacaaccgatgcgattctcacccgatatccgaatgtcaaaattggcgttgataagattggcgcaccaatgcctgtcgcacttgctaaatggcaggttagtcaattaccaacggccttacaaaccaagtatcaagatgcgattgaagataccttagcacggttagcggcgtatgacttatcaatgcacgttgatcacttggcaggtcgtccattgcatttctatcatggaactgctgatacgatggtgccatatcaattcacggcagattttatgaccgaaattcaggcgcaaccaagttcagccaccgcattagtgacattgacgacggaagaaaatgggcaacataaagtatcagacgatgcccagctcaaaaccgttgaactgatgcaacagtacctactttaaaaatgagaaaagccgccagaacgtaaattgttctaattaaaaaacctcaatttttaaggtaatcatttttgattttaatttgaagtaacaatattcgaagagttatcatttttcttggtcatttctcggattttagtggagttagaagtttcaagtggtccgctctgctatgattctctcatgtaaacatcatctttgtatattgaatttctttcgatatctgataaaggtcgtccgtttaatccctgtattacgggcaacatctacatcactcatacccatttgataaagtttaaaagcatgtcgcaagcggggatcgtctttggcatattgaggcttccgaccatgatatttaccctgctgcttagccagggcaataccttgttgctgccgctcaataatccgcttacgttcactttccgcctggtacttatacaattcaatgatgaggttagtcataagttgacgtaaattagggtcagtaattccagtcatggacggcaaatttaacacatctagggtggcacccttattttgaatggtgttcatgatcttagttaaatccaggttatttctgcctaagcgatctaattcagtgaccattacaatatcaccctcacgaatataggccagcattttttgtagttctggccgattagtgttagccccacttaatttatccgtaaataatttatcaacgtcttttaaagccgctaactgtcgatctaaatgttgctccttggaactcacacgtgcataaccgattttagccattttcaattctccttttggacagttctaatgaacacttgtaattcctagtatagcaaagaaataaaaaagaccattagggtataccctattggtcgcttttgatccattatcaatggctttttaaattagggcctagtacttttggaatggaaatactttccaacaccaaaaattctagacccaaataattttacaatctaccatggctaaaatgttaagcatgcgcgatttcgactactccaagatcggcaacatctttgaactagacgaagtcacccctaaaatggcaactgaagaacgccttgatgattctggcaacaaaatcatgggcaatgatggtacaccgcggaaattcaacacggatgaaattgtcggctataagtattccgtcacgattctggaaggtgaacatcgtaagaagtccactcagatcaccgttgctggtctcgactgtccaatcaacaacgcggaaatcatgaaacgtaacagcgtgaaatgccgctttaccggtttagaaccaagcatggtcggcaacccaatctactacaaggctgaaaagattgaattagttgccccgcaggccaaatagaaacactctgggctacccaatctaaacgggtagtcctttttatcgcaattctacttggtcagttgccgataacgttcaaacagcatggcgacggtatcactctcggtggtgcctttaattgtcagcccatatgtccgcataacggctcgatcattatcttggtgggctttgcgcagttcaggaactgtcgccaacggatcatagagatcagctaagctactatccgggtaaagtttacgggcatcgagaatcccctgggctgtttgttcaatctgcgccttttgcttatcatcaacttctggccacggaaaatttgcatagacggttggcgagtaactgtaatcgctcttcattctaccagcaaccgcacgcatccacgccatatgcacattagaagtcatcacaccgaacatatacagactggcattcggaacgagatacagcttgttgctggcaataaccgctggagacatccaccccatcggcacataacgtcggtgttcgctcgaaacctcagggaccgctagatagtttgaatccggttgacgaatttcagtgaataacatgggcatttccgccaatgctttaactgacggtgtaggacttttcaatcttgcttcggtgacggccgctaaccgttccataattggtggaacagaacgaaattgacttggtgatacaccctttaaccaaatgcagtaccgctcaacattattgataaagtctctggagccaacataacgtcgtatataactttctgtctgcgggtactgcttaattaacgccgcccgttcctttggagaaagaatcaagttacccccatcaactggtttactaccctgcgacatcattggaaactgagaaccagacacgctaatctttcgccgaggttgtgggtaaacattcgctccctcagtaaggtacgcattgatgtggtcaaccagcttcatctggccgccttcaaacagacgcttcttctccttgcgcgggtagccggtgaacccaatgataaccacatgaacttgcgccttctccttggcttcactgctccagcggaatgtccgataggcgaattgaatttcaatgcccttctcgaatagttttggccaaagcgttggcgcttgctcaccttgcgtgatcgagttagttgaaacaaaggcgacctcggtcgtcttaccttgaatgaagtcagccgctttgttgtaccacgccgccacataatccagcttgccatacttggtaaaatcatggaaagcaatatccatgtccgctgcttgcgcgcgtgtccgcttttcgtgaccataaaatggtggattaccaatgatgtaagtaattctctcgccgccgactaccgtttcccaatcgagacggatggcattgccctctgtgatgttggtgtacgtcttcaatggcaaaaagtccatattcgcgtaaacaatcgccgccgtttcttccatcatctgcgattcagcaatccacagcgctgtcttgccgacggacaccgcaaagtcattgatttcaataccataaaactgttgaatggacaccttgaccaaatcgtcatcaactgccaacatgctttcattcccgtaaatcaagctgataacctggttttcgagcttccgcaatgacaaataggtttcagtcagaaagttacctgacccacacgctggatcaaagaaacgcaacttaccgagccgggcttgaaaatctgtcgcgcgctgaatcatggtcttacgttgcttaatttgcttgatttcagtcagctcatttcggagaccgtctaggaacattggatcaatgactttatgaatatttgcaatcgaggtatagtgcatgccaccttcacgtcgcgtgtctgggttcaaggtactctcaaacaccgcaccaaaaattgttgggctgatctcagaccagtcaaactccttgctggcttgatctagaatcaaagcgcgcaacgaatcggtgaattgtggaatctcaacttcctcattagtaaacattccgccattcacatacggaaactcagccaacttttcttccagatatgggtcgcgtttatcgattggcgtatccagcacacgaaacaggtctatcaaggccgtacgcagatgccgcgtctcaaattcattgagatagtcgtgaaacataccatgacggccaaaaatgccagcatcttcagcgtacaagcaaaacactagacgtacagacaactcgttaatactacgctgactgctggcattagtaggatcacgatactgcgtgaacagttcatcgtaaatcttgccgaccaactcaccagcttgcattgaaacttccatctctttgtcgagatgcggattcaactgatcgacgataaagtccaaacggtaatactcagtcggtaagtccttaagctggatcactgccggctcgccattaggttgctccatatcatacacgaagaactgggtaaagttgctcgtgataatccagcgcggccgcttagagtacggtaaattggcggaatatcgttttgcttgctcaaatggagacagcaaactgccgtcagactgccgtatgccgtcaaacaagctcttatttcggcctttctgttcaattaacaccttggttgtgtcaatgaaaccgtcaataaagctggtgtgatccagcattactcggtcttcaaaactgatgtactcaccaggattaggaatatcataggcagtctccagcaagtccaaccagaaggtctgactatcctgtcgttcattaccacgatcttgccaacgcttgacaaaggccgtggcggctcgtttttgatctgcttccttcatgaaacagcctcgattcgtcagtattatgtttcaagtatcacgcatcaatcatataaagaaaagcgccagtctcgaagttccgaaaactgacgctcacaaacatggggacatcgctatattctaagtgaattcaaccttgagcttctttcccagtgcaaaggcaatcttgctcatggtatcaaagctagtgttctggccatgctcgatgcgcgcaatcgttgattgcggcacatctgcccgctcggctagttcccgttgggtcaaaccggcgcgttcgcgctcgctcatcaacgccactgcgctctcaagtttggcagattcggcatcaaagcctgccttgaattcagggtccttaagttgttcagcgagataatcgtcaaaagaaatgttctttgccatgttacttacctcccaaattatcgtagtattctgtcctgagttctttggcatgattaagttcagacaccggcgtcttctgggtcttcttcgtgaagccatgcgtaatcacataacgcggaccttcaacgtgaaagtacaagccccgctggatattcgatcctgttgtccgaagctcaaagatgccatctgatatttttctgatccacatttggcgcgccgccacttgcaaaccaaatttctgtgtcttggcaatgacggtgaccagcttctgcttttccactggcttcaaactatctaagaattcttggaattcattgtgtccacttggacgcgtgtaaaactcgaacttaggattttccatgtgtttagtatacacctagcgagccacagtatcaatatatgctatcagattctaaaatccaaatttcaaaacttcttagtctctaaatgagtgaattaaaagaccaccacgttcgggaacgtttgttcgaaaatcgaccataaaagccttctactctgctataatacgtatgaatcaataaaaattatatagataaggcggaacacacatgaagaaaagcctgccacgaaaaatcatctactttgatgaaacctccgctgtagatttattacaggttcgtcaaaaaggacatctgacgagaaccgaggaaacaattcgatctatgactgggaaaattggcgcagatgctgacataaaagcacaactagacgaagatgtcggagtcaataaactggtgagtcatatctctggcttatccgccggcatcaactcaatgatgggagcaaatggatctctcaacggaagtaaaattgccagaaccgtcattgagaattctttgctttatgatttcttagagtccgcagaatcaaaacggggaacgccattattagatattaaggaagattacgcactctcaattccgaaggattcaatgacttacttcgcaactatagcgcccctaacagagatgatggagggacatcaacagctcgacaatccagatattaccatggcaatttcaaaaatgaacagtggcatccgaaactctaaaggttactacgaagtggtcggagaaaaaactgattcaaaatttggtaaatccatcaccactcaaaaggtatttcgttttaacattgatgcttttaagaacaattatcgtattcaggatttgcctaaaatgaacttagttctgtatgctattcacgtcggtacaacaaagctatcccaactcgattttgaaacagagttcaatcttgacagtcagcagtccgaagtcggatttagcggcttagccaagcaggctcaatcccatcaggatgctgattctaacgacgaaaaatcgcttgatgttttcgatgtcgttttagcgggggttcgctaatggcaaatattcaactattctacggatcgagcaaagatttccgctccctacttaatcaaaatcaagtagaggacaattacacaccatttatggagctgattcgtcaatataatgtaacggtccgcgccaacgatactatgggcaacaaagatgccgaatttagccgcgataaaattggtaatgtggtaatttttgctgatgactttgcatcggtcacagaacacgtaatctcaaatttctcgaatattgtactactaggccacgacatcgaaaacttgtatattcagaatcctccgaaacgagttgaatactccatcagatccaaatttgatgaggatgagattgttgaagtaacgtcgccatatttttctccaagtacgaccgaggtcacaaaactttactctcagctactaaccggaaaagttattggacaaaacaatgctaaacacgcatcgtgcgtaggattgtacaaagcggcataccatcaccagaaaaagcccactgtcatgatgttctacggaccctctggcgtaggtaaaactgaattagctaagaatattagcaacttctaccatggtaagttaacacgaattcagttttcaatgatgcaaaccgaagaagccttcaaatatgttttcggtgatgaacatgctcggccatccatggctagggacttactatcgcgcgaatcaaacatcgtcctaatcgatgaattcgacaaggtgtcccctagcttatataacgtattttatcaaatgtttgatgagggtattttcgaggacatcaattacaaagtggatgtatctagttgcatattcatcctaacgtctaatttcaacgatgaggaaactattgcatccacggtgggccttccaatatattcaagaattgatcaaaagattaaatttgaaaaactaaccaaggaggaaatctccacggtcatctcaaatgccttcaagcgaattctgtcagaactcacccctgaggatcagaaatttattagcgcctcaaaattagaagaacactatcaagaaaatttgcagattttttcaaacgttcgcatgcttgattcatttatcgaaaatgacgtatataccatgttgctcgagcaacaaataacagttaactcaagttcagatgaatagtagtgcccgatcccacaaaaaggggtctacacgttcagtgttgattatttctcaacaccagaaagtgtagacccatttttatacaaacaaaatgcggtgttgccaccccattctatttgactgtcaatttgcccactataacattcagttttcacacctttgattttgtagcgtgaatgatcgctgattgtcataatggtttttctattttgcttctaatacctttaatcgcttgaaaacattgacaaaatattttgtttcgtcaatcagcagcatggtcgtcatcaaggtatcttgaccatggaccataatgaacgtgacgtccatgtcagctccgccggcttcttcggccaatatctttgtttgtgagttgtgcgcgtcatcaatagacttctgcgcatctttcaactgcttctcggcttcatcaaattcaccgttttgtgccgcggtcaatgctttcatgacggctgtcttcgcatcgccggcatacgcaacaagttcaaagccagccatcgatatttcttcttttgttgtcatgattctctccctctatcgtttagcgtgaactcacttgatcaaccgcatcagtactaggtatttcatgcgtcgacgttagtttcttaaaccagtatgcactttttttcggataacgtttttgcgttttgaaatcgacgaagaacaaaccatatcgtttgctatagccgtttgtccaagagaacatgtcttgcaaggaccatatgaagtaaccgcatacattggcaccatccgccattgcttcttgaatcgccttcaaatgtaacgcaacatattcaatccgtttctgatcatcaatgatacttccgtcctcaggcaacgattcttttagtccagtaccattttcagtgacgtacattttcttaacgagtggataattgtttttaattcgcatcaactggtcgtacatgcccttaggataaatcggccagtcccaatcagttgttggaataccgggacgaacctgttcctcgccaataccacgtagccgagtgattgatgagccttttttacctgtgccgttgtgtaccgtttcagaagggccatcatatgctttaacgaatttactgaaataataattgacgccgacaaagtctaactgtgccgctgcctgagctaatactttttcatccgcttcagtgattgtaataggcgcttgcttgttggcatctaaaatttcattcatcagatcaagtacttcatctgaataacggccagccagcgtaccatctaggaacaagtaattatccaatgtatcttgtttcttggcggcgtgaatgtcagcagcgttgccttcttcaaacggataaacagtttgaagcgcgtggacaataccgatttcgccaggaagtttcatttccttatatgcattgacaacccgtgcatgagcaatgttttcgttatgctcggactgaaaagttttatggaaattatatttttcacctggtgggaatgttcctgtcgtccactgctgaacagccatggacgttggttcgttaatggtgatccagtaatgaatctcagggaattccttgaaacaaaacttggcgtaatcaacaaatttatcgatgttttcagtatttagccaatcgcctgactcattaatcggtaacggcgagtcgaaatgatgcaaggtgacgaatggttcgacgccgtcttttttacattctgcaaacagccgatgatagaaggccacgccacgcggttcgaccttgcctgagccggttggaaatattcgtgaccaagcaattgagacgcgaatcgcattcaatccgaactgtttcgaaagccgtaagtcttcggggtattcatgataaaaatcacaagccggatccgggctaaaggtaccttgcttctctaaaaacggatcccagagaatcggcccgcgaccatcttcatgcgttgcgccctcgacttgatacgccgcggttgcaccgccaaagtaaaaatctttaggaaatttcacgttggtcctcctcgtttatttagcgtttgcctcaacaaacttgagtgctttatcgccatcttgggttaactgaatgtactcacggccggttgtcgtaaccatcgtgacaccgtacttatcagtaatcttctttaaattccctttttggctatccatttgaggcgccagaatgactaaatccatgtcctcaattagatccatgtcctgaccataagcacgagcggttgcttgtaagggaatctttcgctcctcagccagtttatttaacgcgttggctaggatgccgctcgtaccgccgccagcacacaacactaacacgttggtcggtttacttaatccattagttttcgattcatcaattgtcacatcggacccgccggccagggctgccgctggttcaccaatggcgtctgtcgcagcctgaaccacttgtgtcccatttccagcaacactagctgcggcttcttgcgccgccgtttcagcttcttctgcaaccaactgcaaatcgtaaacttttaggaatggtagataaagcgcaatatcaacaactaacatgagcgcaaccagaacgaacgacaatggtgcaaaaccagttgctactggtagtccgattggtccggggagtgtccacggcatcgtgtacatgattgaattcatacccaaagttgtgacaaagaacttatacatccaaatgttaagaattggcgttaggatgaaaggtaggaaaaagattgggttcatgataatcggtgtcccaaacaggaccggctcgttaaccgagaatgtcccaggaataaacgccgctttaccagtagcctttaattcttttgaccgagcgaagaggagcatgagataagctagaacaaaggtcgaaccagtgcctccaaagttcataacaaagtccatcgtgttataggctaaaacatgacttgcatgctgtccggcttgatatagctgtaagttggcagccgtgttggcaatcataattggcgtaacggctggtgaaacaatggacggaccctgcacaccgcagaaccagaagaatgccatcgcaccggcaatcaatgccaagccaagatatgaatcgctggctttgaacaatggggaaagaacctgaatgatgaacttgggaagattggtaccggtaaatgtcttaaatccgatggtaactgcccagaacgtggtcaccgaggcagccattggaatgacatctttaaaggtctgtgaaatattgccaggtacttgtggtggcaatttgatggtgatgttgtttttaatgcaaacatagtagatattcgggatgattaggccaaccagatatgctgcaatcagcccttgagtccccatataagtcatatcggaacctgtcttaagtggcaaagccgccaaaataaagaatgaaatcattgcggccataataactgaaatcgggttaatttgatttgtcttcggtaactgaatatttttggtgtcagttaagtttttagccgtcgtaccagccacaaacagtgctaacagacccatggagtagttataagcaagcatgaggttgttctcgacaccttttggccagaagaacccccaagcatttggtacatacgcgatcatgagaaagacactagagaacaagatgatcggcattgcagcaatgaagccgtcacggattgcagaaatgtatgcgtttgcagcaatcttttcaaaaaccggtcgcaatttctcaatgcgcttctggaatttgtccatcacgataaaacccctcgattcatataatttttttagtttgcaatgattacgctttcattgactgtcgttattatagtctctaggaaaatgaatgtcaacgattttttactaaaatattttctatataagccaatttatcggagttctttgtttatttttttgagtattcaggtaaatataattcgttttcctaaaggggtaacacggctttaagatttgaatcagcaaatctttagtttttcattttttccaaaaaaaatagccagactgtccgtctgactaatcctgtttatttaaaaataaaatgaccttacatgatggtcaatcgctactttcacgataagtgactgatgtgccgaccgtcagacagattgctggcagatcttctttagccgttaacagctgtgtcattaagccaatcccttgctgaaccatcaaatcggtatagacacgaatggaactcaaagcaggtaaagttgcagctgccgttgcggaatcattgaagctgacaatagccacccgttgcggaaccggaatgtgatgttcattgagataacgaaggacgcccacagccaatgtgtcacttgctacaaaaagagcggttggaaattcgtcatttagtttttcaaaggctcgcgccgtcatctgataccctttttcaggcgtgaccgatccttgaaaaacattttgcgaacgatacaactgtttagatttcaaaaagcgtcgaaaagctcccaaacgtgggtcatagattttttcttgatcgtcactcgtgcgaccgttaccaaccatgatgccaatattatcgtgcccgtgatcaataaaggtttctagcacactctcaattgaaaactcattgtcagttacgacagaggtaatgccgtcgcgaagcgcattttcaccaacaatgacaactttggggttgatttgtttcaactcttcgcgctgtttatggctaaaatgccccactgcaatcacggcatcgcactcctgtaagctagaccaagattcaccatagtaaaaagtcgattttgtgaagttagctgcacttaaagcgtcctcaatcatgacgcgtagtgacaggtagtaggcatttttcacctcttgtacctgtgtaaaccacgtgacaaccccaatccgaccttttttggacttaggagactttttcttataattaacgtcttccgccgcggaaaaaacccggcgttttgtttcttcagtgacagctaatgtcgcatcatagttcagtacgcgagaaaccgttgataatgaaactttagctcgttctgcaatttcttttaaacttgccatacctgccctcctctcaatattccttgtctttcgtcttacattttattttacacatttcgatcctcatatcgcccatgaataattgtcacaaacaaatcgctgccgtcttttaaaaatagccgcacatcattttatgaatgccattaccttaccacaaatcaagcaaataatatggatctggtgcaaacagtctgagagatgaccatctaaccagctattgatcctctgttgaaggttatacagctaacaatgcttctaactcgtccacgactgagaacccgatgagacttaactctcgtcgggttcttttgcgtattgcgtgaacaatttccacaccgctcaacgttgcactagcggttcgaatgctttgaaagcttgctgagcggacacgatgacgtttaatgaatcggtggtcctgttcaatcaaattatttcgatatttggaacattggtgggctgatttgctcaaatagtcttgctttatcaggtgcttcactgctttcagtgttgcccgatattgatcagtgactaatcgatcaggccgaccattggtcgtcaagagacgcttcaaaaagtgataggatgcggtataatcgcggtgttttcgtagctcaaaatccatggtcaaaccgttactgtcaatagcgcgatacaaataggcccaacggcctttaactcgaatataggtctcatcgattcgccaacttttagcgtgagctgtttgatgccgacgccatagagccttaaagatggggccatagtgatgaacccaacgcatgaccgtggtgtgatgaacagtgataccccgatcccgaagcaattcaacgatgtcacgatagctgagactgaatctgaaatagtagccaacggctactaagatgatgtccttttgaaagtggcgtcccttaaagtgattcatgcgcgcaatccctcgtttcttggcacccagtatactaaaatcaagtcagcgaggaaaatttgcaccagaaccactttttcttggttgtttttataactggctttggccttgcgatagttttttacttgttggttaaattcttttctttcataccgcttgctattgatcccctcatgttgagttggtgtatcatctattccctgctcgataaatgatttttcactgatccgatccggaatatttttttgctctaaaacttgattgacactagccgcccaattgtgccgccattcagtaattttttcttttttatcccaatcaactagccacacctttcttgatcttggaaaacgactatttcctgtataagtcttgttcccattttcatctaatatattttcccttttacttttcaatccccatgttccgtctggattaaatggacgattagttagcataacatgagcgtgcggattatatgggtgatctctatgaattgctacgtcggcaaccataccctcatcaacaaaattttcttgtacatattttgtcaataattctttctgttcgtcttcacttaattcaactggtaaagccacgttaaactcttttgcatagcgtgaatttgctcgccgatcttttctttcgacttcattccataatttctctctatcactcgcccattctggcgcattctttggtgtcaaaataaagctttctggcatgactgaccgagcataaaaatagcttcgaccttctttttgatcgaataacttttcaccacttctataacttgctccagcaatggcactacgtcctttaccagcactaatattttgaaaactcatgtgaaaaattgccatgtcggtcaccacctttctttaggtttatgggtttgcttttgttgtcgccaacggcgacttctgatacaagggtttagcacaataatacaaccaactttagttgttgtgtgtaagtgcgcattgaccttatttcactcggtctgctgattctcctgaatttacttttagtatatgccttccgcttcgctatttcaacttttatactttgacttaacgtttttcttatgatatggtgtccatgattattttcaaatatgattggagggataatcatgtcgcaaagtaacttagaaaaacaagaagctaaattaaaagcccttaaccaaaaaatcaaggacgaaaaaaataagattgaacaacgattaggtaaacaaattattagtcaagcaaatttagattatgctaatttgtctaacgatcagattaagcttttagctaagcaattttctgaatttttaaaggtaaagtccgtagatcattagccatacgagatggggaaattccatgtctaatcaatatgaaaaactagtcgagcagcaagcgcgtttaaaacaaaaaattgatcgggaagattttaaattacgacaatctaaatactatgaaaatcggcaagtccgcaaagcccgttctcgccgattaattcaaaaaggggctttattagaaaagtactttcaagctaataacctctcggtcgaacaaaccgaagaacttttaaaaacatttgctgactatgttaacgcccataaaccggataaattaaaaaacgatcaacctaataactaggccgatcgtttttattttcaggattgttttttggcttaatttctggattgtgtttagcaaaatcttttaattgttcttggattcttttaccaatttcgtcttcgactgatttaagctctaagtttgctctaatttgtaatccttgaatgccattgtcatatgtccaccgtttaattttagccatgtcattagttcgataataattggcaattagttcgttccattgatcccacttatctaacggcacattgattaagcctgcaccaccgtcaatcataattttattagcacttaaagtcgccgtccttttgttcccgtcccaaaagatttgttggcgcatattatgatacataacagtcaatgctttatcagtggtcgttgtttgcggatcagccaaaattttttgtaaaaaggattgttcttgtttttcgttaattaagggtggttcaaaaaagtcttcactgcctaaatcaactcctccttttccttgccgtaattctcctggtactaaggcgtcttccgcggccacaatcttgttaatttgtttttccatggttaacgttaaggaggaattttgatcagtgatatattgccacccacgctttaagttaacaattgtcaaaatatcttcaacaggaacgcctgccacactcatgccgtccataatggtttgtgtttgcggcaaagtggtatttacgccttcaaagcgggcactagtgtgtactagcttggtaaaatttgttcgagcaaaccgtttgttttctgcaactgtaaattgatacttgtccatatatgcttgtgtcttagtcatattttgtgcctccttttcattccaaccactgattctttgactcatccatgttaaatcacgaaatgcttttcgttgataatttttttcttgccgtttatctaagaggtaagtgtgtaacgcgtcaaacaacttgcgcttatcagggtctggattatgtgccgcttgttcccaaatgccttaaatattgactgtccaggggtcagccaacaattgctctattttttcgacttctttgcttggtttggtcatttaaaaagctcccttcactttcacttagttcagtcatcacctgttcaaccacttaaggcacctatttttgcttctaaacgattttaaagcagttttaatataattatgcatgcaacacttaaaacggcttaaatgagtccatatgacgtttaatttcaagaacgctcattgtcagtgttctgttcttcggggtgtttggccgcatattctctagccgcttgtttattccaccaaacgccaaataggttttgcatggtgccgtacaagtagttttccacgttcttgatatgcttttcattgcttcttagggcgttaaagtagcgtcttaaggctttagtcatcaaaggttttagttcttcgtcgtaaagcgggattatgacgccaatatcttgatgatccttttcaactcggtacttagcatttaagataatgccgatgaagcgccgcatttgttgtggggtacggcaccagaagctaagtaatttcacggcttcgggttctaagaaaacgggtaagccactgtcttcatcagttaagaagtcattagcatgatttatgagatcctggttttgtttttgaatttctgctggtgagaaattggctgtggaaaagtccaacttttgagtatctatattgcatctgtttttgtctctttctttaggttctctatatagattaagtccattttttgaacttccgctcgtagcaagggtttgagagctttttttaccaaattcgccgcgtaaatagacatcggttgctttcacatcgagcttggacagatataagcgattcggttcatttttcttagttttcgggttaaagcccatttgtttctgaacgagtaatccgattgattccaactctgtttttgttttgatggcttttccctttgagcaattaaacaagtccattagttcttggttggtaaagataaagtaaacatgaccctcactatcaacccagttattacgcaaagaatactctaaacggtctttgaggaccatataagctaatttagcgccattgcttaaatgcttgtattactcgccatacattaatacctaccattaagtttttttaattgcaatataaattttaagaatttattttgcaattcacgaactaagtgacaaatgtggcgtgaaaatatagcgtattcatgctactacctccaatatttttgtaaatttaaactaaatgccgattaacgacaaattttaataaattaacaaatcatacaatttattaaccgctaacaattatgaatttagttaattaaatttttaacatgaaaataaagcttcttatgtttttcaaacgttgtatatacggtatttaaccctttttaacgaactcttgttcgctttgttcgtgtacatcatgacatagcagacaattaagttgcaacatgaaatttaataaaaattaccctgggtactaataattagcctgatagcgccttaaaagttactcccaggtgatagttgccccactagttttatatgctgttatggcacgtttactgcctagttgctcaaactgatcaaacatagtgctaaatacatagctatttaaatcctgtattgcacccaaccgtacgtgttggacaattcgcattaaggcatcataaacaggttggtcgatgtcttcgtcttgtaaatcaaacaagctgctttgtatctgatgactgtttaatgcttgttttttggcacgtagaattgttttttgaacagtacaaaacaattcaaaatctccgtttgataagagttttaaggctaaaagttgttgtttagaaaagatattgtcgttttctaattgcacttcaaacagcgcagcgtcttgtagctgcttgatattttgaggactatccgttagagtatctgtttttttagtatctgtatttaaggttttaagatattcagtattattaatatcagtatcactagttaccgtttttcggtaatctagattactgtttttcagcaatctagatttatcaagggtttcaggctgtccatcattcatagatgttggtaaatcaatgtttacaacttcttctgcgagtggattttcagctgtttcaagttgatcgatgccataaatatcgttatcagtaatttccggtccaagtaaatacatacgatttgctttaccttgtcccatacgtttcataactaataattgggcctcagttaattcctttttgattgaagtgatttttgagtgtccgcaaccaagaatctgctctagttgttcgccagtgtaaataaaataaatattgccggctttatcgaaccaatggtttttgattgaaagttggaggcggtcagaaagaatggcgaaagcaagttttgcttcagcactcaattttttatatttgtcgtttgtcataaagaccttaggaacttggaagaatttaagtgcgtattcccgcttaatgttgtaatagttcagttgattatccatgttagatctccttatcaattaaaaagagcgaacccgcatttgcgagtccgctctagtgtttttagagtaggcaaatgcgagcctggttaaaccagaatctcttttgaaaagccgcacgacctacttttatgtatactcaaacaagcctttttatattgctattttgaacaaaatagcctataattaaagacatagtttagaagaaattacagacaaataacttcttaaagttggtcatcacgaattaccgttcgtgatggctttttatttactatttgaaaataacatttatatcgaagtatagcaagggacaactataattaaagtataagttatactcggttttactagatataacttatactttaaatggattaaatgtataaggtataagtttttggaattggttaatttgttgctgtgaaagtgatattcaacaaattaaaaggtataagttataccctttctgctttagagcgtgtataacttatacctttttcgcttgtgtataaatataatttatttttttattttctcaaattcagcagcaatttctgattttaagtgttcgcttttagccataccaagtctcgtatctatataggaatcagctaaagtgttaacaagtttatcaaatgatattcttttagttgtagtagcaaattctgtcatataatcttgcaatagagataatttactttctaaagctggtgatattttcttaggacgtgttacctggtatctgtcatcttttatttcaacagggcgaccttgcttttttgatcctttttctaacgctggagaagaaggtgttgttgttttagatgttgcttttctactattcattgttgtaccggtaccaaatgaatattcgccggcaatttctactgattgaacttttgattgtggcttatttagtaatcgtgtgaattttttttcttctgtattgtcagtgttaaattgtcttacaaccatttagctcactccttataatgatttcaaatattgatctctactttcaatctctccaagaatttcattgaatccgttatgagctttgaagtcccattgatcaaagttaccatttttatatgtttttaaatcaataccttctcttgagtatcttttaagtcgtttttggtgcgtaatgatagtatcagcaacgacatctccatacgcttctttggcctcattgtaaatttcctgatcaagattatcatcaggttcaaccatacaagcaacaatagcaataacttgaagattaatattaaattgttcaaccataaagttttgatagccaatatatttattcacaccatcaaaggattcatcttgggtttgaaaagcaattatgctgtaatcagatgcggccatagcgttatcggaaaattctgaaatagtcggtggaacatcaatgaaaatagtatcatattgtttttttaaatcattaattagatttgcaataaaacgtacttgttcttgctcgtcgtttgaatacgtgcgaataaatgcaggaaagtttctaaatgcagtgtcgcagccaatcatgtcgagattctctcgaatattatagatacattggtccagtgagactgctctttcctctggtattaaagtatatataatagcgcgtggatctgcttctagttgttgaatacctttatctggagactcttgtgcgagtgcttttaatgtttctgtgtatcttttactgtggcgatcaataatttggtctgtgatagtatattgaatttttgaaagaccacctgttctagctaagatctttgttgcgttaccttgaggatctaaatctagaactaaggtttttttgtttctgataagggcattgtcgaatgcaagcattgtcgccatcttggtctttccaacaccgcctttaaaattaccgatagttaacgtagttgccataagaaacctccatctgtattgtatatataaagtataagttatatcaaaaaataagtcaattattaaagtataagttatataaaaatacataacttatacctttattaattaccttctattaaatcaatctgatgtttaattctaaaaagtgttgcttttgaagtgttgaaagcatcttggatgtaagctgattcctgagacaacttttaagagagggtataaggtagattgtaaaattaatccgaacgctgttcggacaaaaaagatcagcttcctttaaaatggtgtttaccacaaacccatcttttaggagctgatcttttgtctagtataacctattccgaacgaattaaaatcgaaaccttttgtgaactagggctgtccaatatccaaatgggcgattaacagaaaaacgagttcgtttcatcccccactttctttttgcctttagaacgcttagaatatagcgtaagaaatcaagacgaggtggcaatatgacaacgcaagaacgacgtacagcaattctgaatgcaattcaaaagagtgcgcaacccatcagtgccaaagtattagcgcaacaatataaagttagccggcagacaattgttggggatatcgccttacttcgcgcacaaggggcccaaattattgcgacagttagcggttattacgaccaaacgcagacgcaacaaacaatgccatatcaggcacaagttgcctgtcagcataatcaggggcagactgaactcgaattgacaacgattgttgaaaatggggggcgcgtgatcgacgtgaccgttgatcatccattgtatggtgaactgaccggtcaactgggaatcggcaccttgacagatgtcaaatgctttatgcaaaaaatggccacaatgccccatcagaaattactttcaacattaaccgacggcattcatttacacacgattgaatgcgcgtcagaacaacgatttaagcaaattgtcgcagcgcttaaacagataaatatttattataatgcataattaggtgtcttgacatctgtaaactctttttgtatgataggaccattcataacataagggagtaatgcgggatgacaaaagaacataggacacttttatgggctgcaggtggtgcatggttgttcgatgcaatggatgtggggatgctatcgtttgtgattgctgcgcttgccaaagagtggcaactcagtagcgcacaaatgggattaattgggagtgtcagttcaattggaatggtttttggcgccgttattttcggcattttagctgataaaattggtcgaaaaaacagtttactttgttccttattagtattttcgattggcaatgggatatctgcctttagtacatcgttgagtctatttctagtacttcggttattggtcggtgctgggttgggtggcgagctaccggtagcctcgacattaatctcggagaatacgccaacggcatcgcgcggtcgggctgtcgtattgttagaaagtttttgggcagccgggtggttagttgccagtttactcgcctattttgtcattccagtttggggctggcgagtggtcttattgatcacgtcattgcccgccatctacacacttgtgttacggaaacatgttaaacaagagcatgaaccgacgacgattaaccgtaaggtaccattcatgcaacgattgcgtgttttatttgaaccagcgtatcgccaaagaacaattatgttatggctcgtatggtttttagtggtcttttcatactatgggatgtttttatggctccccagtgtgatggtcttaaaagggttcagcttggttaaaagttttgaatatgtgctgattatgaccttggcacaattaccaggctactttgtagcagcatggttgattgaaaaatgggggcggaaacgtgttttaggtggctttctaatcggaacagcactcagtgcattattgtttggcaatgcaaactcagttgccatgttactcgtggccggtgcgctgttatcctttttcaatcttggtgcatggggggcgctatatgcttataccccagaacaatatcctgcacttgtccgtggaagtgggagtggtttagcagctggcatcgggcgaattggcggtgtggttgggccatttttagttggtgcgctaattcagcagggggtatcagtagccgtgatttttacactttttacgggtgcgatactattagcggctggtgccgtgttctttttaggtcaagaaacgatgaacgccgttttaacggatgaataaagatttattaaaatcaactttacaattaaaacaacagatgcgacaatatgactcataggcgctcgtggctcaactggatagagcaatcgcctcctaagcgataggttgcgagttcgattctcgccgggcgcactttgaagcaattgtcgtaaaagcacactagattaactagtgtgctttttaattggtgtaaaataatcaagcggaatgattacgctttcactttcagaaagttacggatttatgatttatattaggtgaaaatatgttaaaatagattcgtattcaaaaatcgcaacgcaaaagttgcaattaatctggaggctttttcatgtcattagttaatggtacagaaatctttaaagctgctcgtgaaggtcattacgctgttggtgctttcaacacaaacaaccttgaatggacacgtgctatcttaggtgctgctcaagaaactaacacaccaatcttgatccaaacatcaatgggtgctgctaaatatatgggtggttacgaattatgcaagaacttggttgaacaaacaatcaagtcaatgaacatcacagttcctgttatcatgcatttagatcacggtaactacgaagctgctaaagaatgtatcgaagttggttacaactcagttatgttcgatggtcatgatttaccattcgaagaaaacttagcaaagacaaaagaaatcgttgctttagcacatgctaaaggcatctcagttgaagccgaagttggttcaattggtggcgaagaagacggtatcatcggtgctggcgaattagctgacgttgaagaagctaaacaattagcagctgctggtcctgactacttagcagttggtattggtaatattcatggtgtataccctgaaaactggcaaggtttaagctttgaccgtttacaagaattagctgacgttattgacttaccacttgtattacatggtggttcaggtattcctaaggaacaaatccttaaagcaatcgaaatgggtatctcaaaagttaacgttaatacagaacaacaaatcgcatggtcaaacgctgttaaagaatactatgcagaaaacaaagatcaagctgaaaaaggcttcgatcctcgtaaagttcttgcaccaggtacaaaagcaatcaaagacacagttgaatcacgtatcgaatggttcggtacaccagctgttaaataattattgttttttcaagagtccaacttcggttgggctttttttgtggtttcatgctagaatgagagcaaaataaaggtggggataagatgacagttattgagcaatataatgcaggccttacaactgatgctgatcgaacactcgcactggcaatgcacaccattcttcgggcagtgttaccggacgcagaaatgaagctggcttatggtttggttgggtattatcagcctaaagcagtttgctattttggcattaataaacggcacattgggttttatcccactaatcaaccgatggcccattttgcaaaagctgtcgcaccatgtcagaccggcaaagggacactacaattcgaaaaagatgtaacggcattaccaatcgagttgattcaaactatcgcgagttagcaattagaacacgttaataaataaggcttacccaaaatgggtaagcctattttttaatgaccactcgtcattttaatgccgagaattccgattactaataaaataacgaatagccaggttaataaagaaatgtgttcattgaataagatgatgccgactaaaatagctcccactgcgccaattccggtccaaaccggataagcaatgctcaatggtaatcccttcgtcgcacgaattagaaaaccgaagctgacgagcatgccagcaatcgtcagtaatgtgtaattgagcttagtgaacccaccactcattttcatagtcgttgcccaccaaacttctgccaatcttgcaatcaataaatcaacccatgccacacaatagaacctcctaataatatcggccacaaaaaaaggacagccaatcacttcttctttgacctaatgaagtgattaactgccccgtggcgacgattaaattaaatatagcatagcaaattttaggttaaaagtgaagcttagccgatagaaccaccaattaaataggtgacgaccatggttaagacgccggttaagacgttgcgtaaaacgcctttgagtcggtttgccttgcctaacgttgcactcgtgtaaccggtcgcgataagggcaagaacaattgaaccgatagttccactgactttgtaagggtatggaattgctaggatggcgatgattggcagcaatgagcctaacatgaatgagaaaaatgatgaaaaggcggcatgccacgggttgaagtaatggtgtaattcaatattgtatttttcgcggagtgtgatgtcaagactgtctttttgcatgaacgctgaagctacctgatgtgcaagtggagtgggtaagccttttgattcgtaagtccgttgtagactggccacttcagcagcgtattcgttttggatggcttctttttgaagccgcatcatggatttctgcgtatcacgttgcgtgctgaccgagacgtattcaccgccacccattgaaaaggcgccagcaagcatgccagaaataccagcaagaaaaatcgtgtactgactttggtgggcgctcgcgacaccgactacgattccagctacagagataatgccatcatttgcacctaagacgccggcgcggataatgttcaaacgttctgataaatggaaacgatgttcgagtggtgcactggcggataattctttcataatggcggactcctctggttgatttaacttcattatagctaattgagaaggattatcaatcgtttttgaacaattgttcaaaacaaaaacattgtataaaacctgttataccagtacatacgaatcattattactaacgaataatgatatagtgaacaaaaagtatgccaacagtctagcacatcaaaaagggtcgcaacaaaaattttgtcgcgaccctttcgaattataaatgtgtcagtgcttggtagtagaagaatgccgtgattgcggttaagactaaaccggcaacgcacacaatgattagaccaccaatcgcttgtttctggtaggcgctataggcggttagtccaatgaagaaggtggttagacaaacgcagacgccaaggagcatgagccatgtaatcattagtcagcccagtcaccgtttctgaaaatggggacaatctgaccgtcgtgcgttaagccatcgatgttcatttgactggaaccgaccatgaagtcaacgtgggcttgactacggtttaaaccagctgcttttaattcctcttcagacatatctgtgccgccttcaattgaaaaggcgtaagcagagccgagtgccaaatggtttgaagcattttcgtcaaataaggtattgtagaaggtgatctttgattgtgaaattggtgaaggatctggtacaagtgcgacttcacctaggctcttgaccccagcatcggtttgtaagagtttttgtaagacatcgttgccttcttcagcggtggctttgaccactttaccgttttcaaaagtaaattgcatgttgttgagtgtgttaccagcgtaactcaatggtttcgtagaagaaatgtagccatcgatgttgttggcatcagctgctgagaaaacttcctcagtaggcatgttagcgacgaatgaacgaccatcactactacggctaggaccacccatccagatgtggttttcaggtaacccaattgtgagatcagtgccaggggctgtgtaatggagtgctttgtattgcgcagcgtttaattcagcggctttggcttgcagtttcttaccatgttgttcccaagcaaggattgggtcttctttatctactcgggttgttttgaaaatctctgtccataacttatcagttgcggcttgttcgtccatatcaggaaagactttctttgcccaagcgggactagctgcggcaattacaatccaactatttttgttggcttgtgttgcttggcgaactttaagcattgcttgaccgtttgccttttgaacagcagcgacccgatcaccatcgagacccttaaggttatcaggatcgctcgacatcaccgaaatccgtttggcgttgtttgctaaccagtaatcgtattcttgtttttggaagtctggcacgttaacgaggcgatcttcggctttgtgttgcatattgattcgatcgatgtcgtcatcttgccatttgataatcacttcggctgcaccgaggtcataacaagcagctgtcatatcacgggcgaattcagcttgatcaacagcgatttgtaaaaccactgtatcaccaggttggacgttaattcctgttttagcgactaaagcggcgtatttttcaagattatgttggaaagtagtcatcaaaaattcctccttaagggcgatttaatatgtttatcatagcacatggcgatttaaaaaactcgtaaaacagataaaaacgttttcatgttatttaattttgtggtagagtgacagtagataatattgaaaaacggattgatcggttaaggagtgggaacgatggcacggacaaaacggattaaagcggagcaaattctggataaagcatacgaaatggtattagcggatggtttaaaagcaattacagcgcgcagccttgccaaggcactagactgttcgacacaacccatctatttagaattcggtaatatggccaatctcaagcaagccattttggaacaagccaaggcgcgtttggtgtggtatgtcagtgaagaacaacgaacagatgatgccttagtcaatctcgggattggctatattcattttgctacaatcgaaccagaactttaccgtgcgttatttattgataaccactttggtaaggatgaagcacaacttttcatggggcaactgacgcaaactagattgcaggactatcaaccgttaaaaacggttagtgagtcagaacacgaacgcattattaacgaagcgtggatcattattacgggtttggcgaccctaacgaatgcgaagttggtacactatagtgacgcagaaatagacgcgatgctcaaacgaatgttgaagcaatgtttttaaaaagagacgcctaaaaaggcgtccttttttatattcagactgttattcatttgtaaggtggttaaagattggcaaatctttagaaaatatgtagtataggggggtaacttattaaataataggaggcagctttgtgtctaaaattaaagtaatgactgtttttgggacacgaccagaagcaattaagatggcgccgctagtattagcattgaaagaacgcgcagatgaattcgaagctgtgacagtggtaactgcccaacatcgtcaaatgttagatcaagtacttgaaatctttaagattaaacctgattacgatttagacgttatgaaacaacggcaaacacttagtgaaattactagcaacgtattaatgaaccttgataaagtgattgcaactgaaaaaccggatatcgtattagtccatggggatacaaccactactttcgcagcaagcatcagtgcattctacaatcaaacagcgattggccatattgaagcaggactaagaacttgagataagtattcaccattcccagaagaaatgaatcgccaattaacagatgtactcagtgatctttattttgcactaaccagtcaaagtgaagccaacttattacaagaaaatcacccacaaaaggctatttacattacagggaatacagcaattgatgcattgaaacaaacggttcaaagcgactacaatcattcaatcttggatgttgttgatgctgacaaacgaatgattctagtaacaatgcatcgacgtgaaaaccaaggtgaaccaatgaaacgggtcttcaaggtaatgcgccaagttgttgaaacccatgatgatgttgaaatcgtctatccagtgcatttgaaccctgttgtgcaagaagaagcaccgtcattaggcaaacctgtgttggtcttacgggatacaactgaacgacctgaaggggttgaagcaggcacgttgaagttggttgggacacaaccagaacaagttcatgatgccatggttgaattattagatgatcaagccgtatatgaagcaatggcccatgccaagaatccatatggtgatggacaagcatctcaacggattttagatgcaattgcttatcattttggccaatcaaaagaaaaaccagaagcgtttaaataatgagcattgaaaaagccctcgaccattatcattttgactgataatggcaagggctttttttgatgagataaacgtgcggattcaaactgttttttgtcgtaatactcagttgctaagtgcaaccaaacgcactctatttcttttctttcacgatatacactggtctgtttttaacttctaggtagattttgccgatgtatttgccgacaatccctaggcataggagttgtaaaccgccgaccattaggataactgaaatgagtgatggccaaccgcttgttggatcgccaaaaatcaaagcgcgaataacgatgaagattaatgcaagcagggcaatcacgaatgagaaaaagccgacgaaggacgcaatggctaatggtgtttctgagaaagttacaatcccatccaatgaatatttgaagagtccccagaatgaccaactggtttgaccagcaacgcggtcttggttcttatattctaagtacttggtgtcaaagccgacccaactgaaaatcccttttgaaaaacggttgtattcagacatctctaagatggcattgaccatctgccgagtcatcaagcgataatcacgagcaccatccacgatttcagtttgtgaaatccggttgataatcttgtaaaattgtttagcgaagaacgaacgaacggggggttcacccgcacgtgttgtccggcgagtgccgacacagtcataaccttcgacttcaatgccgtgaatcatttcgggtaatagttcaggcggatcttgtaagtcaacatccatcactgaaacgtagtcgccagttgcggcttgtaagccagcatacaaggcagcctctttaccgaagttccgagagaatgaaatgtagtgaacgtgttcagggtcttgtgcctgtaacgcgcgcatttccgccaggctttcatcagcagaaccatcgttaacgaagatgtattcgatgcggtggtcggctagagtagccgctactttctcaactgctgcgtagaaaagcggaattgattcttgctcgttataacagggtacaataattgaaatcatcttaatcctccgaagtatctttgaaaatccatttgctaaatacatagttcgctaaaatcacgataatctgatctagcactttaacaatcatgttgggccataccaataaggaaatcccaacaaacataattgccgtatccattataaatgatataccacggaagaaaaagaaactagccatttcacgggaaaagtcctttaaagttgtatattttgactgaaagacccacgttttattggtgaaaaaggcaaatagcacggataagaaccaggcaatcgtgttgctgacgagataattgatagttgtatagtggtctaatccgaagaaaacgaccatgttgactagggttgttaagacaccaaagaccaaatacattaattgttcccagtatttttgaatgagttgttggatggctttaatcattgtgacctcttttcaaaatggcattgtaccgacggagaatccgcccccggagtgccatttgttgttctgtttttttgaaagtgtagcgggtggtgatgtagttgacaatgccgacaattaactgatcgataatcttggcggtcatactctgccaccctaagaaggagatggcgacaatcatcaaaccgttatccaagaaaaaggatacaccacggaaaaagaaaaacgaaagcacttcacgacacacagcgccaaacgtggtgtatttggattggaatacaagcgacttattggtaaaaaagccaaataaattcgcgacaaaccacgccattgtattggcgagtaaatacggccaaataatggtgtggcgaaatacccagtaagtaaaaatattaaccaacgatgctaaaaaaccaaaaatcgtataggtcaaaaaatcgcggtatttaaacactaaccgtttaatgaaagccataaagacagctcctagtttgatttattaaggtctaaaagaccaaaagaagggccgcggtaaaaagggacgtaaccgcggcccagggaagattggttgaaacgtgcttgttgaaacatacttctgcgcttaaccaaatttaccaaataggtgattgcatcacctattcggcaaatccagttaatgctcaaagcataaccgtttcaaacgcactctgccttgaaacgtgcttgttgaaacatacttctgcgcttaaccaaatttaccgaataggtgattgcatcacctattcggcaaatccagttaatgctcaaagcataaccgtttcaaacgcactctgccttgaaacgtgcttgttgaaacatacttctgcgcttaaccaaatttaccaaataggtgattgcatcacctattcggcaaatccagttaatgctcaaagcataaccgtttcaaacgcactctgccttgaaacgtgctttataagctagtatcctgtgcctagctacgtccggcaaacagccaacttgttggctattcaccagactaggttagtgctcggatactgaccgagcttataacgcactctgttttgcaacaatctctgatacgaatttttcaagatgttcgatatcttctgcttctgctgatagatcgactttgacaacgtctgaaccctttgttgcgccggtttgttcgaagacggctgcaaaatcatcaaccactttacagaagtcatcgtagaacgtatcaccggagccacagacaccgtagactttaccagttaaatcaatatccttgagatcttcgtagaaatcaacggcttcatcggggagatcgccatcatcgccataggtgtagctgcagacgatacagatatcgctgtcttcaaaatcggcaggatctgcttgagagatttcagtggtttcaacgtcgacgttcaaactttcgagggcttcttcaacgatttcggcaatttcctcgttattgccggtcatacttgcatagactactttagcagttgccattattgggacatcctttcacgtacgcggcgctcagtggccgcaattaacgaattatactataaggcattatagcaaaagccccttattaagaaaaggttcaacggctctttcacggttaattgaactaaaaagcgacgattcgtccattttaatggcagatagcgtataatatagaaatagatacaattaaaggctacaatggtaacaatattggaggtttcattttgattacattaaaatctgaacgagaaattaaagggatggctgcttctggcgccattattgccggcgttcatcgcggcttgcgtgacatcatcaaaccaggtatttcgagctgggtaattgaagaattcgcaaacgactacatcgaacaacacggtgccaaagcatctgaaaaaggctttgaaggctacaagtacgcaacttgtgtctgcgtgaatgaggaagtggcacatgccattccacggaagaacttaattctaaaagaaggcgacattgtcagtgtcgacatgaccgttaacttggacggttatgaaagtgattcttgctggacttatgcggttggcgaaatcgcaccagaattacaaaaattaatggacgatacgcgcaaagcactttacttaggcattgatcaagccgttgtcggcaatcgcctaggtgatatcggccacgccatccaacaatataccgaagttgaaaacagctacggtgacgtccgtgaattgattggacatggtattcaaccaacgatgcacgaacaaccaaacgtgccttcatacggtgaagcgggcaagggcttgcgccttaaagaggggatgaccatcacaattgaaccaatggtcatcttaggtggcacatggcacatcaagtcaaaagaagtccctggcgaagactgggaatattacgtctcagcagatggcacaccatgtgcgcaatatgaacacacaattgcgattaccaaagatggtcctaagattctaacctcacaagatccagaaatggatgctaaatatttactataaaattagaaaccttctctaaaatgagaaggtttctttttttgctttcagaaaactattagcccatagttaattcgtgtataatagaaatgataaacatgccttaagaagtcgggaaaataagcctttcaggtagaacgactaatgtgtaaaagagaatttggagtgacatatgacagtagacaatcaaaaccagttaccggtggtaaaacaggacttatccagacggcagaagttgattgctgtggtgaagttaatgatgttgcgttcatcagaagcaagcattagtgataattcgaaggtaatcgcatattattcgttattatcaatcttcccactattaatcgttatcgggaacatcttaccgtacttccagttagatgtaatgagtgtggcggattacgtccaaacggcggtgccgcccacgatattcgacaagattatgccagttctgcagtccctattgaagaaacgcaatgatggcttattgtccgtcgggatcttggggacgttgtgggcagcgagcatggggattaatgccttaaaaaatagtattaaccgcgcgtatcgtgttgaaaaagttcagaactttgttttaaaacgcctgatttctttggggagtacattattattacttctattattagtcggtttaattgttgtttttacattcgggcaacaagttttggaattattagtcccaatctttaacattcctaagacatacgttaatatttttagtagtttaaaatggccagtgacggggatcgccttgttcctactgctgattttcatctatttcttcgttccgaatgtgaaaatgcgattgcgaagtgttctgccaggggcagcactgacaacggttggctggttaattcttgcacaagccttctcattgtatattcgttacttcggcacgtcatggaatagttacggtgcaatcggtgcggtgattatcttactcttgtggctgaattattccgcaacgattctgatggttggggctgtcttgaatgttgtgattgaagaagcactgcatgggcatgttaacgccagtcgcggtaaggttcatgacttcattgcgcgtcggcgcgatcaaaatgaatgacagccgaaaaattaatgagacaaagcacaaatatgaattgaaacgttaaccaattatataggttgtaagaattcgggaatcaaccggatgattacaacctatttttagtctctaaaattaaaattatttatctcaaccgatatgtcaaactaatgtttttacatatcggttttttgatggacttagatttcgtaaaccactttcactttcgatactttaaaaatatttaattatttaaaaatcttgaatattgaattaccgcccaatgttaagggggttattcacaatttagtgtgaaaactaagtgttttttattaaggtgtattccagaaaaggatttcctttttaataaaagttatactataatagaaaatattgtagtataaatagtatgtaatgtgattgattatttttttgtttagttttcgaggaggatacgaaacggatgactgcagaagaacagaagcgacaccatcaccataagcaccggcgcagagggtggacattaacaaaagtgattttagttgttcttggggtattgattcttgccgggggcgcattcgcagctaaggtctatatggatgttaatcaaaccgccaagacagtgtataaatccaaaggtaagacacaaaataagcgcaaagtttcagaaaaagtcgaactgaataagaagacgcctttctcgatcctcttactcggtacagatacaggggaactaggccggaccgaaaaaggccggactgatacgatgatgcttgcgacggttaatccaacgactaaggaaactaatatgttgagtatcgcccgtgattcaagggtaccaattgttggctatggtcagacggctaagattaatgccgcgtatgcctatggtggcattccaatggcagttaatactgtccaagccttcttaaacgtaccggttgattactatgtattggttaacatgaagggcttggaacaattagtggatgccgttggtggcgtgaccgtggataatgatttggacttcacctatgaggggcaccacttcgaaaaaggaacggtacaattagatggatcaactgccttgaaattctcacggatgcgctacgatgatccacgcggagattttggtcggcaactccggcaacaagcaattgtccaagctgttttgaagaaagcaacttcattaaatatggtgacaaactataaccaaatcttacaggtgctagcgaataatatgcaaactaatatcaccttgaaggatgtcttgaacattcaacaaaattatggggatgcgatgaacttcaagacattacaattgaaagggactgggcagatgattgacgggcaatcgttccaagtcatgaatccaactgaggtatcaaagatgtcgacacttctaagaaaacaactagatttaaaataaccacggaagaagctaaccagtattggttaacttcttttcgtatggacaaagtagttataactgttaattaatttctggagggtatcatggaacaaacaattaatattgaacagattttcggcatcttgcgcaagtatcgccgcttaattctatcatcgacagtggtatgtacattattagctgttatcgtgacattctttttgattacaccacaatatagcgcttcaaccgaactgttagttaatcgcaagcaaagcggtgatgcaaatgtccaatggaatcaagtccaaaccgatgtacaaatgatcaatacgtataaggatttaattacgaaaccagtcattatggattcagtcgctaagaaaattaacaagggtagcaatcaaaaattagacgatacaactatcgcaagcatgattggcgtttcaaataatcaaaattcacaagttttctcaatcactgctaaagcagataatgcttatacagctgctgatattgccaatacaacagcgcaaactttccaaaaaaaggcacccaagattatgagtgggacagataatgtctctattatttcagaggctaaacctgatttaaagccagtttcacccaagaagaaattaaatgtgttaattggccttgccttagggatattactcggcgttgggattgccttcttacgtgagttgacggacaagacggttaaagacgaaagcttcctaacggatgatttaggcttaacaagcttaggcgttgtgaataacattgctgaaaaagatttaatcaaaaaagcgattatgagtgtcagcactagccgcttatcgagaagagggtaagaagaaatgggattatttagaaaagaaaagaaattagatcaagcaagtatgcaagaaggggtcggtttaattactttaactgatccgacttcagttattgcggaacaattccggacaatccgcacgaatattcaattttcatcaatcgatcaaaagttgcgcagtgtagtcttcacgtcatcaggcccttcgcaaggtaaatcaacggtgagtgctaacgttgctgtaacctgggctgatcaaggagttgatgtattgctagtcgatgctgatatgcgtcgaccaacagttcatcaaactttccaagtaccgaataaaaaaggcttaacgtcattattaacggaagaaaatttcgatttaaatagtgccattcaaaaaacaccggttgatcatttatttgttttaccatgtggggtagtaccacccaatccatcggaactattgaatactaagaaaatggataaattgattttagaattaacgaagcactttgatttagtgatttttgatgtaccgcctgtagtatcggtgacggatgcacaaatccttgctagcaaagttgatgggacaattctggtggtaccacaagggattgttgaaaagggttcggttgccaaggcaaaagagttgttagaagtcgttaatgcccgaattttaggaacaattatgaaccgcgttaaagcagaaaatacgggtggctactatggtggctactatggtgccaaagagtccaagaaatagtttaaattgggggaaataaagcatggagatacaaaaggaggacactagtcgggcgtcgattgaaaatacacaccaagtaatgctttttaatcaagctgttttagatcagcggtatatttatcgcggcttaaaacggttattcgatattgttgccagtttggcagggttaattctattaagcccgctatttttggtactggcgatttggattaaggttgatgatccagcgggtggggttttctactcacagactcgtttaggtctaaaacaaaagaaatttaaaatgtacaagtttagatcaatgtgtagtgatgctgatcagaagttaaaagatcttctcaaatataacgaggttgaaggtgcgatgtttaaaatgaaagaggaccctagaattacatcagtagggcgtttcattcgcaagtatagtattgatgaattaccacaattgtggaatgttctagttggcgatatgacgcttgttggaccgcgaccaccattggaacgtgaaattaaagagtatactgattacgattggcaacgcctaatggttaaaccggggtgtactggcttgtggcaggttagcgggcgcaacagtatcagcttccacgaaatggttgaattagatttgaaatatattagaaaaagtagtttggtttatgatttggggattctatttaggacagtcaaaatcatgattataccaaatgatgcgtattagtctgaggagaataaaatgagtaagaatgtatttattatcggtgccaaaggaattttaacaaattaaaaaagcgttcaaatcgatttcagatttgaacgctttttttaattgacgtgatcgttcgcactgcccgcaaaatcgaggcccatgcgttcaagaataattgtggcagtttcttcgatcgaacggttggcaacattaatcacttggcaaccaatcttatcatacaggtcttgggcgaaagccaattcagctttaatttcgtccatgtctgaataagtggtatcaggatttaacccataagcaatcatccgttcccggcgaatgttattgaggacttctggtgtattcatcaggccgataattttcttaggatcaacccgccagatttcgtctggaatgtgcgcttgtggcacgattggtaagttggcaaccttgatattccgattggctaaaaagagcgacagcggcgtcttagacgttctagaaacaccgagcaacacgatatctgcttctaagaaaccgtgggggtctttaccatcatcgtacataacagcaaattccatcgctgaaatgcgatcaaaataacgatcgttcaaatgatgtagtgccccagcttcaccagttggcgtgctgttggttttagcagtaatcatttgtgtcattggtgacatcatgtcgaaactggcaatttttttcgcttggcaataggtttcggcgatttcagaaagaccgttagtggctaatgtatggaccacaattgtttcttcaggaaccgctttgcttaagacgtccatgagtttctcttgcgtgtgaacgaaggggaagcggacgagatcaggtttaacgtccggaaattgggcgagcgctgcttgtgctaattggagggcggtttggccgactgagtccgaaagcacaaaaacggttaatggtttagattctggcataaggcatgctcctttattcacttttatagcgctatcataccataattatcgaaaaaatcgctagatttgaaaaaatattcaattaattccctgtgggttattgaccgtattttcaacattcgctataatagcaaagaacggttcacgtgaagttaaatttttaacgaacgtaaacggttatacttagcacgcgaggggagggatatcatatgggcaagacagtcgttcgcagtaacgaatctctagatgatgctcttcgtcgcttcaagcgttccgtatcaaaagctggtacaatacaagaatatcgtaaacgtgaattttacgagaaaccaagtgtaaaacgtaagttgaaatcagaagctgcaagaaaacgtaagaagttctaatttcttagataaaggaaatgattgaatgagtttacttgaacaactaagttctgatttgaaaacggcgatgaaggccaaagataagttgcgattagctgttattcggagtttaaagaccgctttaactaacgccaaaattagtgcggggcaagacttatcttctgacgaagaattaagtgtactatcatcacaacttaagcaacgtaaggattcattagctgagtttgaaaagggcgatcgtgcagatctcgctgaacaaacaaaagcagaaattgaaatcgtacaagcttatttaccagagcagctagatgaagcagcagtggtcaccattgttgacgaagcaatgcaggctactggtgcgacaagtaaggctgactttggcaaggtgatgcaatatgtcatgcctaaggtcaaaggacgagctgatggcgctatggtcaatcaagtcgttaaatcaaaattaagttaattttaggcgggacttcctctggggagtcccgcttttttttatggtcgttaattcagattttgataattgaccataaattcgtgaattagcgcggctggctacttttaaaacggttgttgtttgtgatagaatgatggtagttttcattctaaaacaaatgaagttgaaacgtgcggttgcaacttgattcttcactttacgacgtgtagttaataatcgactaaagtcgtttatttgctgggctagataatactcagaatcagttgcagtcacactctggaaggagttatctttgttggctgaaacagatgagcgtttatttcaattggcaacgccaaatttagcggccgctttaatgggcacacacgatacttttttaaaaatcatcgaggaaagcttatctgtcgaactgattgcgtttgacgagcatattaccattcgcggcgaacaaccagcagttgaccaagccgcttctgttttagaaaacttagtggcgctgttacaacatggcattaagctcaatagtagtgatgtggtgagtgcgacgaagatggcccaaaaaggcacgattgctggtttccaagaactttacacggagccattaatcaaggatcgtaaagggcagcatattcgcgtgaagacattcggtcaacgtcaatacgtgaatgcgattcgtcaaaacgatgtcacgtttgggattggccccgccggaacggggaaaacattcttagccgttgtcatggccgttgcggcgttgaaacaaggattagtcgaacggatcattttaacgcgtcctgcggttgaagctggtgagagtttaggttttttaccaggtgatctaaaggaaaaggtggacccttatttacgaccgatttatgatgcattgtatgccgttttgggtaaagaacatactgaacgtttgttagagcgtggtgtcattgagattgcaccgcttgcgtatatgcgtggccgaacactagaagaagctttcgttattttggacgaagcccagaatacaacgcctgctcagatgaagatgttcttaacgcgacttgggtttaactcgaagatgattgtcaacggcgatattagccagattgacttacctaagaaaacaatgagcggcttggtgcaagctgaacatattttgcacgatattcctaagattgctttcgtacagttcagttcagaagatgtggtacggcacccagttgttgctaagattattaacgcctatgcggcgattgaaaagatgagaaagtaggaacacttgaatggatatccaaattatcgatgaaacaaaagtagttgcagaagcaaacgtaaaactggtcacggatattttagaatatgccgggcaacaattagatttacctgaagacacagaaatgtctgtcacgtttgtgacgaacgaacgcattcgccaaattaacaaggaataccgcgatactgaccgtgcgactgatgtcatcagttttgcaatcgaagaagatcctgaagaagaaggattaccagccaactttgaagaactattcgacattcccaagaatatcggtgatttgtttgtttcattagaaaaagcagctgaacaagctgaaacttatggacattcatttgaacgtgaattagggtacacaatggttcacggcttcttacacttaaatggttatgatcacattcatagtgaagatgaagcacaaatgattccattacaggagaagatcctcgatgaatttggattacaacggtaaaaaaccacaaacgggcaagaataaacatttttggcagtcactacgccacgcactcggtggattatggaccgcctttaaaactgaggctaatttacggcgtgatgcctggtttgcactcattgcgattgctttcggtgtttattgtcagttacattatttagattggttagcgattatttctgccatcttcattgtattcattgctgagttttggaatacggtaatggaacacttggttgatttattggttgaccatcagtaccatccactcgctaaaaagattaaagatatcagtgctgcgagtgtcttaatcagcgcaattttagcgctattgattggcgccattgtctttggacacgccatatttaactaaaaggggactattatgtcagaaacatatcgctcaggctttgtggccattgttggccgaccaaatgttggtaaatcaacttttatgaatcgaatgatcggtgagaaaatcgccatcatgtcatcaaaagcacaaacgactcggaacaaaattcaagggatctacacggatgacaatgcacaaatcgtcttcgttgatacaccagggattcataaaccacataacgaattagacgaatacatggatcaagcagcgctttcgacgtttaacgaagtcgatgcgattttattcatgattagtgggattgataaaaaagggcctggggatcaatacatcatggaccaattaaagaacgtcaagaaacccgtttatttggttgttaacaaaattgacgcgatccacccagacgatttattaccaatgattgaacaatatcggcatgaattggacttcaaaggggtttacccaatctctgcattagaaggtaacaatgtccctgaaatgttaaaagaattggaacaaacactcccagaaggcccccaatactatccagaagatcaattaacggatcacccagaatatttcgttgttggtgaattaattcgggaaaaaattcttgaattaacgcatgaagaagtgccccattctgttgccgtggttgtggaacggatgaaagaccgcgtcaatgataagctccagattgaagcgaatatcattgttgaacgtgatggtcaaaaacggattatcatcggtcaaaagggctccattatcaaagaaatcgggattaggtcacgtcgcgaaattgaagctttacttggcgaaaaagtcaacttgaagctctgggttaagattcaaaagaattggcgtgacaataaccaatacctccgtgaatttggttacaataaaaagagattgtaggcttaagcaatggcggaacatcgattcgaagactttaatggtctagtgatgtatcggaagaactataaagaaaaagatatgctggtcaagattttgaccgatcgctttggcaaaaagatgttttacttacgcggtgcgaataaaccgaagtttcgcttgagtgcggctattttgccgtttacccaagctgagtacggtggcgacattcgcgatgatggcttatcctttttaaataatgtcaagtcggcgagtcagtttcaatcgattagcaatgacttgtttttaaatgcctatgcgacctatatcttaggcttagtcgatgttggttttccggatagcgaaccgctcggcagttggtatccgaagattgaacaggcactctcattaatcgatgaaggttttgacgcggcaatgattacgcacatcatcgagattcagatgttacaagtcttcggggtgcagccacaactgcaagtctgtgcggtttgtgggcgttctgatttgccgtttgattattctgagagttatggcgggctgctttgtcaacgccactggcacttggatgttaatcgattccacggtagtcaacgggcgatctattatctgcggttgttttcagtgattgatttattcaagatccaatcggtcaatgtcaaacaaacgacccagatggagcttaagacgatgatcgaccggatttaccaagacacggttggcttgtcgctcaagagtaagcaattcatcgataagatgtacagtttcgatagtcaattaccacaattaaaaaaagtgccgtcagaaattgacagcacgccaaaagacgactaaaatagtaatcaacttaatagacgttgaagaaaagggtcccttaagatggtcagacagtgattctaggtgagtgagaactagaacaagacttgagtggattggcgtttcggagtcataccaatgaagcagcagctcgctttgagctgaagtagggtggaaccgcgagaaatcgtccctatgtgacttaacagtcgcataggctttttttatgcgcaaaatacggaaaagaggaattgaaatggttaaaaagttaaatgtgcaagaaatgattttaaccttacagcgtttttggtctgaaaaaggctgtatgctaatgcaatcttacgatacagaaaaaggggccggcacaatgagcccatacacgttcttacgggcaattggaccagaaccttggaacgccgcttacgtagaaccttcacggcgcccagcagatggtcggtatggcgaaaaccccaaccgtttattccaacatcaccaattccaagtggtcatgaaaccagccccattaaacatccaagaattttacttggatagtttacgggctctaggcatcgatcctttggaacatgacatccgcttcgtcgaagataactgggaaaacccatcaatgggttgtgccggtgttggttgggaagtttggttagacgggatggaagtgacgcaattcacgtacttccaacaagtcggtggtttgcaatgtgatcccgtgacaagtgaaatcacatatggggttgaacgacttgcttcatacatccaagatgtcgacaatgtgttcgaacttgaatggggcaatggcgtgttatatggcgatatttttaaagaacctgaatatgaacattcaaaatatgcttttgaagacagtaaccaagacatgcttttgaaattcttcgatgaatacgaaacagaagcaaaacgtttaattgacttaggccttgttcatccagcatatgactatgtcttgaaatgtagccacacattcaacctattggatgcccatggtgccgtttccgttacagaacgggccggttacttgtcacggattcgccggatggcgcactcaatcgcgcaagcattcgttgctgaacgtgagaaacgtggcttcccgctcttaaaacatgctcaagaatcaaacacggaggtcgttaacaatgactaaaccattcttattagaaattggcttggaagaaatgccagcccacgttgtgatgcccagcatccaacaactagaaaagcgcgtacgcgactttttagaagaacaacacttaacattcgggaccatcaaaacttatgcaacaccacgccggttagccgtcttgattgaagacttagcggacaagcaagctgatattcacgaagaagcgaaaggccccgctaagaaaattgcgcttgatgctgaaggtaactggagtaaagcagcgcaaggttttgttcgcggccaaggtttaacaaccgacgacattacttttaaagcactaaaaggtgttgaatacgtctatgttgaaaaatcaatcatcggcaaacctgttgaaacaatcttgccagaactaaaagccgtgattatggcgatgtctttcccaacacggatgcactgggcagactacgattttgaatatatccgtccaattcactggattgttgctttattagacgatgaaattatggacttcagtattttaaacgttacaactgatcgcacaacacaagggcaccgtttcttaggtcaagcagtaacattggcgaaagcaactgattacgaagcaacgctggaagcacaattcgtaattgcggatgaagctaaacgccaaaacttaattcaaactcagattgaaacaatggcccaagaaaacgattggcaagtcgatttagacgcaaacttgttagaagaagtgacgaacttagttgaatggccaactgctttttatgggcaattcgatcctaagtatcttgaaattccagaagaagtgttgattacctcaatgaaggataaccaacgttacttctacgcacgcagccaagcgggtgatttattacctgttttcatcggtgttcgcaacgggaacaccgacttcatggaaaatgtcattgctgggaacgaaaaagtcctcacagcgcgtttggaagatgccgatttcttctaccatgaagatcaaaaggtaacgattgaacaaaacgttgcgaagttacaaaacgtgtcattccacgacaagattggtagtctggctgaaaagatgacccgtgttggtttaatcgcgcaattcttaggccaaaaatttggtttatcagaagcagaattagttgatttgcaacgggcaagtgatatttataaatttgacttagtgactggcatggtcggtgaatttgccgaattgcaaggggtcatgggtgaaaaatatgccttattacaaggtgaaacaccagccgctgccacagcgattcgcgaacactacatgccaattagtgctgaaggtgcactccctgcaacaaaggtcggcgcggttttagcaatcgctgataagttcgatagtatggctgatttctttgcagtgggcatgattccaagtggttcaaacgatccttatgcattgcgtcgtcaagcttatgggattatccgcatcttagaaaaccaaaactggcacttcccaatggccgattatcaagctgcgatgagtgacattgttaagcaacaagctgatttcaaccttgattggtcaaccaatgctgacgcgatcagcgatttcttaacggatcgtgttcgccaacgctttaacggcatgcggcctaaagtccggcgtgatatcgtagatgccgtcttgaagaatcaaagtcaagatccagtcgtgatgttcgaagctgccaaagtgctttcagaccatcaagatgatgcagatttcaaggcaacggttgaagccgtgacacgtgtgttacgactcgctgaaaaagttgactttgcaacaactgatttaacggttgatcctgcattattcgaaaataaagctgaaaaagcactttacacagcggtcgaagacttacgtggtacaattgctacgaacccattagctgataattacggcatcttacaaacactacgaccattaatcgaagcttactttgatgccacaatggtcatggctgaagatgaagctgttcgtcgaaatcgcttaacacagttgatgattatcgctcaaatcgcccttaccttaggtgatttaaacgaattgattgttaaataaacaattcaaaaggggataatagcatgttacaaatgaaacgggtttatgaagcagcgacagactcagatgggtaccgaattctagtcgatcggatttggccccgcggcatttcaaaagaacgtgccgctattgagacctgggcgaaagaaattaccccaacgactgacttacgcaagtggtttggtcatgagccagctaagtttcccgtttttaaagaaaagtaccttgctgaaattgcagctaatccagcttggccggcgtttgaaaaggtagtgcacgagcaccttgagctgggcaacgtcacgttagtctatgcggcaaaggacctgcaatataatcacgttgtcatcttaatgggacttttgaaaaaggaccttgacaacgaatgagatagtttgctatatttatttgcaactgtacctaaatggtgctatgatatatagtgtatttttgtgctgataatccttaaaagtcgcatttcattgtgaggtgcggcttttacagtcttagtacaatttgaattgaatagtgaggtgagaccaatggcgggaaagattccgaatgacgtgattgatgatgttcggagccaaactaacatagtggatgttgttggtcagtatgtccagctcaagaagagcggcaataacctatttgggatttgtccgtttcacgatgagaagaccccatcattctccgttagtgaagagaaacagatttttcattgtttctcttgcggacggggtgggaatgtcttcaagttcttgatggaactggaacagattagttttccagaagctgttacaaaaatcgctgactttgtcggcttcagtttagcggagacttatcgacccactcaaaatgttcaagaatcaagtgaagtgacgcagtttaagcaactctatcgtcaggccaatgaactctttacgcatattttaatgagtactgaagcgggccaaccagcgttagattacttacacgaacggggcttgacggatcaattaattgagacgtttagtattggctatttaccggatcaaaccgatttaatgctttcattcttccagaataaagaagttccgtaccagacactacgtcaatccggcttatttattgaaactcagaccggcaagctgcatgatcgtttttccggccgagtgatgtttccgattcggaatgcgcaaggtgaagtgattgctttttctggccgggttttggtgaaacaaccagatcaacccaaatatttgaacagtcctgaaaccgtgatttttaacaagcggaaggttttgttcaactatgatttagcaaagactgctattcaccaagaacgcaaagtttacctgtttgaagggtttatggatgtgattgcagcgtattcagccggtgtttcaaacggtgtcgcttcaatggggacgagtttaacgactgagcagttgggaattttagggcaacaggctcgggaattaattgtctgttatgatggtgatcgtcccggaatcgaagcgatgaaacgcgcaattaccatgttgcagcaaaataccaagcttgaattgagtgtggtggttttgcccagtggcgctgatccggatgaatatgttcgccaatatggtgctgaacaatttaagacaaccttgcaaaatggtgctgaaacaccgattgcatttgaactgcggtatttgaagcaagggttaaatctggataacgagaaggatcaacttgattacgtgcaacaggcattgtccgtcgttgcgccaattgattcgccgcttgaaatcgagatttacctcaagcaaattgaagccgatagcggcattacccttgatacgttgaagcggcagttacaaacattgcgcgttaaacgggcaacgcagcaaccacttgcaccggcatctagtcagtatgattatgacatgccacctgaaccggatgacgcatttgtgggtggaccaccgccaatcattggtgatccgcgggcaacagcgacgcgtcagccacaacggctaacccgggttgaacacgcggagcaagaagtgttgcatatgttgatggctaatgacgatatgcgcctgcaattggagaacaatgccgattttagttttgtgcataccccgtaccaactgatttacgagttatggcgcgcctttttagctgaaggtaagtcgaccttggccgacttcatgggttatatcccagatgacttacaagccttagtcgttcagattgatgcgcttgacttaccagaagaggcaagtcaagaggcgttaaacgactgtctgttcgtcattgcgcaaaataacgttgaggaacaattaagagaagcgaaaattgccttaaaagaggcgaccaaattggggaatgcgagcgaagaaacgcgcttaaccctggaggtcattagacttgtttcgcaaaagaaattaggaaattgatattaggaggtttctgaatggctgataataaaaaagctgacacgaagaaatttgatactgcggttaaggctttaattaaggaatacaaaccaaagaaagaaatcaccaatgatgaactcgttgcaaaaatcgtgaaaccatttgcgctacaagctgatgaaatcaatgaattaatgcaaaaagtggaagaccaagggattgggattgtcgatgaagatgggaatccaagtgccgctacccttaaaaaggaaaaggtttctgctaaagaattaaaagatatgactgcaccaaccgggattaagattaacgatcctgtgcggatgtacttaaaagaaattgggcgggtatctcttttaaacgcccaacaagaagttgacttagccttgagaatcgaacaaggtgatcaagaagccaagcaacgccttgccgaagctaacttgcgtttggtggtttcaatcgctaaacggtatgttggccgtggcatgcaattcttggatttaattcaagaagggaacatgggcttaatgaaggccgttgaaaaattcgatcaccgtaaagggttcaaattctcaacatatgccacatggtggattcgtcaagcgattacgcgtgcgattgccgatcaagcccggaccattcggattcctgtccacatggttgaaacgattaacaagttaatccggattcaacgacaattacttcaagatttgggccgcgaaccaacgcctgaagaaattggtgctgaaatggatatgaatacggataaggtgcgcgaaatcttgaagatcgctcaagaacctgtttcccttgaaaccccaattggtgaagaggacgattcacacttaggcgattttatcgaagatcaagatgcaaccagtcctgaagaacatgcttcttatgaattgttgaaagaacaattagaaagtgtcctagataccttaacagaccgcgaagaaaacgtcttacgtttacgtttcggccttgatgatggtcggacacggacattagaagaagtgggtaaggtgttcggcgttacgcgagaacggattcgtcaaatcgaagccaaagcattacggaaactccgccacccatcacgttcaaaacaattaaaagactttttagaataaaagagtgcgtaagcaggcggctatattttgagggttagcatagtcaggcgaataaccaacgatgttggttgtttgactgacgtagctagccgcagaaatatgcctgctagagcacgttttcgataaagtgcgtttagttacgggagcaactgagcattaatacaatattgtcattaattcagattttagaattaatggcaatgttagattaagcggaagttgttgaactaaaaagcacgtttaggcaatcaataaaaaggccgcaagctaacctagcttgcggccttttttgcgtgtatctaaacaagcagagcaccaatccccactactaaaaatacaatccccatcaatgcacctgaccataacgccatgggcatgaagactgaagtactgtggtttgcttcaaccttcaaagtcttgaatgttttaatggtcattgaaagttggaaaacaccgatgattagcattaaaatcccaataattggtaaccagttcatgttaccacccccttcactgtaaataatttatcttatgttaactaggattttcgaaaactaataaagctcaaaaagaaggggctaattgacgtttataaccaattcaataaactagcaagactaatcccaataaagacaagccccatgaaagcactcgaacagagcgctgctggcgcaaagacagaagtattttgatctgcgtgtaattttaagtcttgataatactgatacgacttataaatttgaaaaatgcctaaaccaatcatgaaaacacagaatagttgcaaccaactcatgagaccactccttaatgtatagaaagcgttttcgatttaatttcagtataaaactaaattttgcctaaagcaacttctgctatccagaatcaagtgttcactttgactgcgtatgccgtctaaaatttggtatactaactataacaatcaaagtttctagaatggagttttatttttgtcaccaattcatttatcaaagcgtttagctgcggttgcgcagtttgtcccacaagatagcattgttgctgatatcggttcagatcatgcatatttaccaatttggcttacggaacaaaaccggttgaagggcgccattgccggtgaagtagttgccggtccgtttgaatcaacacagactcacgttaatcaatggcacttacaacaacagattcaagtccgcttaggcgatggcgtcgaggtattgaatcctgaagaagaccatgtgagttgcatcgtgattgccggcatgggtggtttattgatcacggaaattttaacccgtggattggatcatctgaacggccatgaacgactcgtgttacaacccaatatcatggaaagtactgtccgtgaatggttgaatgcacatgactatgcaatcgttgatgaagcgattgtcgctgaagacgggcatatctacgaagtgattgttggcgaaccccaaccatcagttgcaccattaagcgaaagtgatcgagtgtttggccctgttctccgccaaacacaacctgctgatttccaattgaagtgggggacaatgttgaaaaaacggcgtcatttattgcaacaattacaaaacgcacaagtcgtacctactgataaagtcaaagcagttgaacatgaaattgcattaatcgaggagatgaagacatgggaaaattagtcgcgagtgacttaattgctgcgattgaagactacgcaccattggcattaaaagaaggcaatgaccccaccggttttcaaatcgggcgacgcgataaaagcattgaacgggtgttagtaacccttgatgtccgcccagaaaccgttcaagaagcgattgaacagaatgttgattttatttttgcccaccatccagtaatgtttcgcccagcgcggaatctcgatctaagtgatccgcaaaacaagatgtatgcggatctgttaacgcatgacatcacggtatatgccgcccatacgaatttggataagactaacggcggcatgaatgattggctagctgaagctttacaactaaacgatgtgcaaccgtttaacatcacggactaccaatcattagtaaaattggtggtctttgtccctgagtcacatgctgaacagatgcggatggcattgaatcaagctgatgcgggacatattggcgattatcaagcctgcagttttagcacgaccggaatagggcgttttcaaccaacggacgcagcaaatccttatatcggccaatcaggtgatctagaagcggttaccgaagttaaaatcgaagttgttctgccagtggccatgcaaaccaaagttgttcaggcgatgcttgcggcgcatccttatgaagaacccgtttatgatgtgattccattagctaatcaacaacaaccgattggtattgggcgcattggtcaagtcgctcaatcaatgacggtccgggattatgcgcaatttgtctgcgaaacatttgatttaacaggtctgcgcttaatttcaaatgaaccggacaaaatagttcagacagtcgccgttgtcggtggcgatgggggtaaattcttcccagccgctttacaagctggtgcggatgtctacattaccggtgatgtgtattatcatactggtcacgatatgttggcagctggtttgtcagtaattgatcctggtcatcatgtcgaaagtattgtgaaggataagatgacagaaatttttgaaaagtgggccaaacagcgtggttggtcggttacattcattaaatcacagcaaaaaactgatccgtttacatttatttttaatgcgaagtaggttagaatagaattagtattaaataatatctaggaggctacaccatggctaaatatgaaaaattgattcctcgttttctagaatatgtcacaactgaaacacgttcagatgaaaacgcaacaacgagcccatcaacccaaacacaagtggtatttttacacaaattgatggacgacttgaaggaaatcggattaagtgatgtgaaatacaacgaaagtaatggctatgtaacagcgctattaccaagtaatattgataaaaaagtgccaacaatgggctttttatcacacgttgatactgccgacttcaatgccaaaggtgtcaatccacaaatcgtcgaaaactatgatggcgaatcaattattaaattagatgatgcgggtaaattcgtattagatcctaaagaattcccaaatatgaaaaattataaaggccaaactttaatcacaactgacggctcaacattattaggttcagatgataagtctggggttgctgaaatcatgacagccatggacttcttagtccaacatcctgaaatcaaacatggcgacatcaagattggttttggccccgatgaagaaatcggaactggcgctgatcactttgatgccaaagatttcgcaaccgactttgcttacacaatggatggcggtccaatcggtcaacttgaatacgaaacattcaacgctgctgccatgaaagtcgatattcaaggtaaaaacgtgcatcctagtgaagctaaaaacatcatgatcaatgcccttcaagtggctgttgatttccaaaatgctttaccaagcgatgaagtccctgaaaaaacagacggtcgtcaaggtttctatcacttattaagccttgaaggcacagttgatgaagcacacatggcttacatcattcgtgatttcgaacgtgatggtttggaagaacgcaaagcatttgctgctaaagttgctgatcaaatgaatgctaaatacggtgaaggccgcgttgttgcaacaatcaaagatcaatactacaacatggcagaagtcttaaaagatcacatggacgttgttgatcttgctaaagatgcaatggaagccgttgatatcaaaccattaatcgaacctgttcgtggtgggacagatggttctaagatttcattcatgggtattccaacccctaacatctttgctggtgctgaaaacatgcacggtcgctacgaatttgtttcaatcgaaacaatggaaaaggccgttgatacaatgcttaagatgaatgatttaaacgttgaacggaactaatcaacaatctaaaaagccccgcacaaattgaatttgtgtgtcttggtgttttttattttatcaattagctaaaagtatttggctaacttgattataaaacgcgcgaataaaaatctatcaaaatgttgtcttgaaaaagtatcaggaccggttatattttgaaagacgtcaatgggcaacatcgaaaattgaaaggcgtcaaattacaggaaatattgatgatgtattgctgattgttgatagggacattgtggaagtatatacaatggatgggcttcaagtaatgactggcagagtgttctaaagtaagtaaatggtttcttagcacaggaaaaatatagagtattgtaaattaatagttaatcaattgttctttaatctcccaccctaaatatggtacgcttatgttagtttgaacgaggacgtgagtgggatgcagaaaaaagcactttttaaaaatggtctcgggattatcattggcgccttgatttatgcggtggcgattaatgatttcctgattcctcatcatattggtgaaggtggcgtgactggcttaacggcgattggctactatgcgttagcaattccgccagctgctacgaatttggttctaaacggtttattagtgattgtcggctttaagtatttagagaagcaaaccatctggtattcggtctgggcggtactctggatttctatcttcttgcggctcccgcattttatcggctaccatacgacacagacgatcattccgacgataattggtggcgtcttgatggggattgcaatggcgattattattcattgccaagggacgattgctggtagtacgatcttagcgaagattgccaatcgctatttagggatccaaaacggctctgcgatgcttttttttgatttaattgtcgccattccatccggcttcattatcggcttccaaaatatgctcttaacgattattgaattgtatttatcagcagtcgttttgaataaattgttggctaaatttggggcaaaacgcgcggtgacgattatttcggatcaatatgcaacgattgcccaaacattgtcgacgcaattccaccagggcatcacgatcattaaagcgcaagggtactatagtcaaaatgaccgaccgatgctgtatgtcatttgtacggccaaacaactcgcgacgctcgtaccggtggtctcaacgattgacaagcaggcgctagtagtagtcgaagaagtccgcagtgtccaagcagaacaattgaaacagcttctttagaaacaccgtggttgaccatggtgttttttactcgctaaaattagttttatatagtaagatataattaatgctgatataaaaacaatttaggagtggacgggatgaaaaccaaaaagggtggttatttaactttgaagattcgcttattaaatacccgactttttaatcgttatttaacggctgatccacgcgcgtgctataacgctgaacaggggaaaattttgtcagcattgtgggatcatcatccgcaaactgctacggaattggcacaagtgactggcttagccaatagtagtttatcgttgatgttacggcgcttagaagaacagggattattgatgagtgagcaatcgccacttgataagcgcaagcgggtctttgacttaactgaacaaggcgctaatcagcaacaggtcggtgatgacgttagtcaacgattgagcgccgttttttacaagggcttttcggatgctgaagtggcagctgttgacggctatttagaacgaattttagcgaatttagaagcagaggcggccgtttttaaccgtcaagcaaacggggagcgaaccaataatgacaattgaacaaccaacgtagattgaagtgcgtggcgggaacgtcaataacttgaaaaatattaacgtcgatattccgttgaaccaatttgtggcgatttcgggaccgtctggttcaggaaaaagttcgcttgcgatggggattttatatgcagaaggctcacggcgttatttagaggcgttgtcgacgtacacgcggcgccgaattacgcagaataaacgctcacaagtccaagaagtgcggcatattccatcagcgattgcacttgggcaacgaccaagtgtgccatcagaacggtcaactgttggttcgatgagtgagatttttaatgtcgtcagattgattttttcacggttagggacgacacgttgtccaaatgggcacgtgattcaaccaagtctaaaaattgcccaagcgatggacttagctggcgataaaatggggattattacgtgccctacttgccaagtgcagtttatggctaaatcggccgaagactttgcctttaattcagctggcgcctgcccagaatgtcatgggacggggcagattcaaacgttagatgatcgcaaaatcatcgcggatgaaaatctcagtattgaagacggagcgattgcctcatggcgattgccgggccgaaatttcatgccaaccgttgctgcccacattggggtccgaattgatgtcccttacaaggacttgacggccaaggaaaaagaaattgtcctgcatggtaaacgggcgaagtatgcggttgatttccatacctcaacgggccgtgtgtttagtacggagaataccctctatgaaaatgcttatgacgctgtttatgaatcgctaaaatcggttaaaagtgatcgggcaatggctaaagtcaattcatttttccatttttcaacctgtccaacgtgtcatgggacccggttaaatccggcattactgacccaaacagttggcggacaaaacattgcagcagtttctaatttgacgttaggcgcattagaagattgggtgcgtgctactaaggccgacttaccggatgaaatgtagcaaatggcgacaattttatttaagaacctattagaaacactgcaaccgttactagaattagggttggattatttaacgttgtcgcgcaatgggaatacattgtcgactggcgagctccaacggattcaattggcgcggacgttgcgaacagcgacaactggtgtgttgtacgttttagatgaaccattggttgggctgcatcctgacaacgtcgaagggctaattcatattttccggcagctagtggcacaaggcaattcgttagtggtagttgatcatgaagtgaatatcatcagtcaagcggattgggtgattgaaattgggccagaagctgggcgcaaagggaacaagtgattgcccaagggaaacccgcggatttgatccagaatccacagtccctgattggccactatatcgctggtcgagcgaacatcttatatcctaaagtcactgccgcaacgactggtgagcagacaacgatgacggttggccaatattttaatctgcatgatgtcacaatcaaagtgccagataaccaaattacggcggtttctgggttttccggcgccgggaagacgagtttgattctagatagtttagtgccagcaattgaagcgcaccaccaacatgagcaattacccgagcaggtcacccagttgacgaccgatttaacgtcagtcgtcagcattgatgccaagccggttggtaagaatacacgctcaacactcgcgactgatacgagtatcatgaacaatctgcggaaattatttgctggtttatcagaatcacaagcgcatcattatgggatcgcgcacttttcgtataacaataaagaaggcgcctgtccgaactgtggtgggttaggcagcattattttggatattcaatatttgccagacatggaagaaacctgtccagaatgtcatggtaaccgctacaaaccagagattgaagccatcaagtggcaaggctatagcatcgttgatctattggctttatcggtggaagaagcaatcccggtctttgcagatgtgccagcaattcaaaaggaacttaagattctcaaagaaattggcttagcttatttacaccttggtgaaagtacaccgagtctttcgggtggcgaagcacagcgcttaaaactcgcaacgcatttgaataaaaaacgggcgggcactttattcgtcttcgatgaaccttctgttggcttgcatccgcgcgatgttgaaaccttagtaggcgtcatcaaccagctaaaatccaagggtgccaccattatgatgattacccacgaccttgatttgatgaccaatgccgattacctgatcgacttggggcctaaaggtggtagtcaaggaggccaagtgatggcgatgggtgcaccatttgagcttgttgcctcagacgcggagagtttaaccttaagtcatttacgggcacattttaagaagtttcaattaacaacaactaaagtagggtgaaaaaatgggacaaacctctttgtttgatcaagagatggcgatgaatgcgccgcttgctaatcgggtccgaccgtctgatttagacagttttgtcggtcagaagcatttagtcggaccaggcaagtttttacgcgaaatgattgataaagatcaagtgacttcgatgattttctggggaccacccggcgttgggaagaccacgttggcggagattatcgcgcgcaagacggcttcgaaatttatcacgtttagtgccgcgatgaatgggatcaaagagattcggaagattatgaatgaagccgaagaaaaccgccaactgggtgagcggacgattgtctttattgatgaaattcaccggtttaacaaggcgcaacaggatgcttttttaccgtatgttgaaaaaggcagcattatcctaattggtgcgacaaccgaaaatccgtcgtttgaaatcaattcagcattgctgtcgcgttcacgcgtttttgtgctaaagcaattgacggaagcggacattattgagttgctacaacgggttttaaaggcgccccaagctttcccggatttaacggttcatatcagtgatgaattattgaagcaagtcgccatcttttcgaatggggatgcacggacggcgctgaatattttagaaatgttagttattaatagtgatgtgcaagaccatcaagtgaccgtcgatggcgatctattgggggaactgctaaataaaaaaaccgcctattatgataaagacggtgaggaacactataatattatttcggctttgcataagtcgatgcgcaatagtgatgtcgactcagcgatttattggttggggcggatgattgacggcggcgaagacccgatttatattgctcggcggctcgttcgttttgcgagtgaggacattggtctggccgataacaatgcattgaatttagcaatgaacgtctttcaagcttgtcaggcgattggcttaccggaatgcgacgtgcatttaacacagtgcgtgatttatctatcgcttgcgccgaaatcaaacgccacttataaggcgcggacagcggtgcaaaaggatattaaaaagacgattgatgaacccgtgccattgcacttgcgtaatgcggcgacgaaattgatgaaggaagtcggttacggcaaaggatatcaactcgcacatttctacgatgatagattgaccacgatgccaactagaccagagagtatcgccgaccatatttattaccggccgaccgaacaaggcaatgaaacgcggatgaaacaacgtttgaattacattaatgaatggaaacaaaagcacaatactgattttcaagataaataaaaagtcgcagtcatttgactacgactttttaaattaagcttcttttgccactggacgccagaggcctaagattagggcactgacaaatgttccgattaacacggcaagcacaaagagtaggccgtggttggcaagtggtgccacgaagatcccaccatgtggtgcagggacagtgatttgccataattgggttaaaccaccaccgattgctgaaccgataatacttgaaacaatcacgtgtaatggatctgatgcagcaaatggaatggcaccttcagtaatgaatgaaatccctaatacatagtttgcgaaggcttgtttccgttcactaccggtaaatttgtttttgaaaatagtagcagcaaccgcgattgccaatggtgggaccatcccaccagccatgacagcggccatcaatgaaccatctttggtggttgtgaagacaccgattgcgaaggtataagcagccttgttgaaaggaccgcccatatcaacggacatcatgccacctaaaatcgcaccaagtagtaatgcgttaccagcccctaagtgtgttaagaaggtactcaaccagaggttaatttgagcaaagactgggttgatcatgaagtacataataaagccaacaatcgatagtcctaatacagggaatattaagattggttttaaaccatcaagggtttgtggcaagttcttgaagactttcttcaaaccaacgatcacccaaccagcgatgaacccagcagctaaaccgccaaggaatccggctggactctttgaagcaaggacactggctgttgcttggctagccatgtagcccccgacaaatccgggcattaaggcaggccgatcaccgattgaaatcgcgatgtaagcagcaaggaccggaattaagaagttaaaggcattattgcctaatgagttcaagaaaataaaagtggttgaatgtgcgccaacggtttgttccaaaaggaatgagatggccatcaagatcccaccaccgacaacgaatggtaacatgtttgaaacaccattcattaaatcttggtagatgcgactccaaagggttttcttgtcagctgaagcttcttcgcttgattggctttcagttgcgtgatagattgagccttcttcatccaatgttttttgaatcaattcagctggtttcttgatgccgtcgatcacgggacggttcaagagatgtttaccatcaaaacgaggcatatcgactttcttgtcggcagcgatgataacccctgttgcgcggttaatatcgtcagcggttaattgatgtttaacgccttcagaaccgtttgtttcaactttaatgtcgatgcccattttagcagctgtttctttcaaggcagcttcggccatgtaagtgtgggcaatcccagttgggcaggctgtgacagcaacgatgaatggtttttgatcatcagctggcgttgcggctgcggcttgtgctttagcggcttcttcagcttcttccttcgcatcttctgcgtctttagcagcttgagccttagcaaagagcgtttgcacgtcttctggtgtttgggcttgtttcaaatcagcgactaattgtgggttgattaaaagggatgaaagaccagccaaggcttgtaaatgcgtatcgttagcgccttctggagcggcaatcatgaagaacaagtaaacgggttggccgtctagtgcgtcatattcaacaccgttttgacttttagcgaatagcacagttgcgcgttgaacggcactgtcttttgcatggggcattgcaatcccttcgccaattccagttgatgattgggcttcacgagccaaaatatctttacgatagagggcgtcatctgtgataacaccgatgtctttatagcgggcaaccatttcatcaacagcggcttctttagtcgttgcttgtaaatccatgatcatcgcatcttttaagagtaaatcttggatgttcataataaatctcctttgtatttaaaattaatcaacttgtgtgatttcaatttgaggtaagagttcgttaatcttagcgctagtggctaaatcttcagaaaaggcggtggcactaccacaagcaagacttgttttaaaagcggcgagtgcatcgtgatgttgtgcgaatgtgccgacaaaaccggcgatcattgaatcaccagccccaacggaattaatcactgtccctttaggtgtaccaccgaggtaagcgtggtctggtgtgattaaaagggcaccgtcaccggccattgagaccaagacatgttgggcaccttggtctaataatttgcgaccagcggcgatgatttcactttggttggcaaagtgtgtgtcgaacagttcggccaattcgtgatggttgggtttgatgaccaatggtttttcagccaatgtgtctaacaaagcttgaccggttgtatcaattacaaattcagcgttgtgcgcttgaatcaatgggattaagtctttgtagaaactagccggtaaattaggtggcaaactcccagacatgaagacaatatcgccggcttctagcttagccagttgttgtttcaagttggcaacggcttctgctgaaatgtgtgggccttgaccgttaatttcagtttcttcagtattgtcttttaacttcacgttaatccgggtgtcttcttcgacttcagtgaatcgacagtcgatcgaagcgttgttgagtttgctttgaatgaattgaccagtgaagccaccgacaaagccgagggcaacgcttggtaatgctaattcggcaaggatgcgtgaaacgttaatccctttaccaccggggagcttaacgtcagattggacgcggttcacgttgccggtatttagtttttcaagttgaatgacgtaatcgattgatggattcgccgtaatcgtataaatcaagataaaacctcctggatttctgtgtgtgaatgatagtgtttgtaaacagatggtgacaattgatcagtaatcaattggacttgtgccaatggggcaaacttactgaacgaaacagcgtcgaattttgtgtgatccgccaaaaccatcgtttggttcgcttgttgaatcgcaaagcgctttagagtggcttcttctggatcaggggtggttagcccagcttcaacatcgataccgtttgtgccaagaatcgcctgattgaattggaattgcaaaagggtttctaaagcagccgcaccgaccatcgctttggttttgctcttaacacgcccacctaatagaaaggtttgaatttggtgatcggctaagagagaagcggtatcaaccccattggtgacgaccgtcaaattcatttcaggtcttaagtaggggatgattgcctgggtcgttgtgccggcatctaagtaaatgacgcagccttgttggatttgtgctgcggcaaacttagcaatcgcgtttttttcatgaacgttcttgccgtttttttcaatctggccaagttcttcttgtaacgtgttgatgcgcttagcaccaccgtgaattcgagtagcaagcccttgttcttcgagcaattgcaagtcacgacggacagttgattcagaagtgttcaatagctggcacaaagattgcatcttaacgacgtcttgttgctttaaaagttgtaatatcgcttggtgacgttcttctgttaacatgacaaaacctccgtagcatcattatgacatcgtttccattcaaaagcaatcgaaatatttcaaaaacgttcaaaaaccatcaaaacgctgatatagaccgaaaaaaagattggtgcgttagtgagcaaactgcggacaatgccagaaatagaccagtttaaaagtaatgtaagagttttcaaaagtgcttaaggtatgctagactaatagatgacagggtggtatagcccaattattaggaggttctattcatgggaaaactaggcgtttcaatttatccagaacgatcaacttttgaaaaggatgcggcttacttagatttagcgcatcaatatgggttccaacgcgtctttacatcattattggaggtgtctggcgatcaagaagccgtgttaggcaactttaaacgggttgtagcccatgccaaccaattaggaatgcaagtcatgattgatatcaatccgggtttgttcaagcaactcggtatttcatatgataatttaagttttttccatgaacttggtgcttggggaattcggttggacaacggttttaccggccaagaagaagcggaaatgacgcgcaatccgtttaatttaaaaattgaaattaatatgagtcaagggacaagttacgttgataacattatgagttattcacccaaacgagaaaacttgttaggttgtcataacttctatccacatcggttctcgggattaggtgaagacttcttcaaacaatgtacggcgcaatttgcaaaatacaatttgaatacagcagcgtttgtcaattcacatgaagcgactttcggaccatggccaacacaagatgggttgcccacgatggaagttgatcgcgatttaacgatggcaacgcagatgaaacattacgttttaatggataacattgatgacattattgtcggtaatgcgtatgcttcggaagcagaattgaagacgatgcatgacgtctttaacgctgaattcccagcaatcgcaatcgacgtcgcagatgacattacggctgatgaacgcaaggtcctctttgaaagtctgcatagttatcgtggcgatcgttcagaatatcttctacggtcaacgatgacacgggtcatttttaaagacctgcttttcccagcccaccatacagttgacatccaacacggtgatattttaatcgataacgtcggttacggtcagtataaaggggaaacccaaattgccctcaaagccatgccaaatgacgggcgcgtgaatgtggttggccgtattacgcctacagaattattcctattagactatttgaaaccatggagccaatttaaattggtgccagctagccattaattaacgaataaaaagcgtactgattgaggtcactcactcagtgcgctttttatcgatgatagagccaattcagtgtttaaccagttatctgtttacttttaatctttttttcggtagtatataaggtactgtttaacgatgagaaggagtcaaaatatgtttgtagatcaagtcaaaattgatgtgaaagctggtaaaggcggcgatggtgcagttgcatttcgccgtgaaaagtttgtgccacttggcggaccagccggtggcgatggtggtcggggcggaagtgtcattttagtggtagatgaaggtctacgaacattaatggactttcgttaccgtcatcactttaaagccaatagtggtggtaatggtcagaataaacaaatgtacggccgcggtgccgaggatacatttgttcaagtgccacctggtacaacggtgcgcgatgctgaaaccaatgaattactcggtgatttaaccgaagatggccaacaattagtgattgctaagggcggtcgtggtggtcgtgggaatatgcatttcgcaaatgcccgtaatagtgcgccggaagttgccgaaaacggtgaacctggtgaagaacgcagcattcaacttgaattaaaagtgcttgctgatgttgggttggttggtttcccatctgttgggaaatcaacgttgttgtcagtggtgacaagtgcgaaacctaagattgctagttaccaatttacaacgttggtccctaacttagggatggtgcaactcgatgacggtcgggactttgtcttagccgatttaccggggttaatcgaaggggcttcagacggtgttggtttagggattcaattcttacggcacgttgaacgaacacgggttgtcttgcatttaatcgaaatggacgatcaaacgggtcgcgacccatttgaagattaccaacaaattaatcacgaattagagacctatgatccaaaaatcttagaacgaccacaagtgattgtagcgactaagatggatttaccaggttcttctgaattattagccgagtttaaacaaaaattagcagctgccggcgatacacatgagatttttgaaatttcaagtatcacgcatcaaggggtgcaatcattgatgaacaagacagctgacttattagctgaaacgactgaattcccaatgggagacgtcgaagaagttcaaacgcaaaaactttatcaatatcaaccggaagcacctgctttcatcattgaacaagatgaatacggcacgtttattgtgtctggtgacaaggttgaaaaactcttcaagatgagtaacttggatcatcaagatggtgtcatgcgttttgcccgtcaattacgttcaatggggattgacgaagccttacgcgaaagtggcgcacatgatggtgatttagtggcaattgataactttacgtttgaatttgtcgaataataggcacgtcaagaaaggaagacattcatttttgaatgcttcctttttctatgggatgcataaaataacagggcttaatgtaggcacatcactaaaatattgttataatagcagttattagaatgtagagtaggttgaaaaaatggcgggcaagaagcgtttaaagaatagtcgttacattactggctttgatggtttacgcgcaatcggcgtgattggtgttattttataccatctgatgccatatacttttaccggtggttatttaggggtcccaatcttcatggtggtttcggggtatctaatcaccgatttgttggttcaagagtgggaacaaaatcaatggattaatttaaaaagtttttacttacgccgggtaaaacgattgtaccctgggctgataacgatgctgtttgcaacgggcgcgtacatcacgctttttcagcgggaaatgttacagcaacttaatcagattattatcacgaacattttatacgtttataactggtggcaaattggacatggtcagtcgtatttcgatcggtttgccaataatgagtcgccgtttacccatctgtggacactatcgattgaagggcagttctatctaatttggccttttatcgttgtggccttgattattggtcttaagaataaaaatcggattgcccaagtattactagcagtcagtgttgtttcagcaatctggatggccattttgtaccaacccaatgctgaccctagtcgtttgtattatggaacggatacgcgggtcttttcaattttactaggagcagcgctggcgtttgtttggccatcaacagcccttaagcaaaagattgtgcctaaacaacgcctcgtcctcgatggcatcgggttagtgagtgtcctcagtttggtttggttaatggttaagttgaatgccgagagtagtcttgtctatcgcgggggactatttctgtttagtgctttagtctgtgttttagtggcagttgtcgctcatccaggcgctgattggaatcggttattgacgaatccggtctttaactggttaggtaaacggagttacgggatttatctgtatcaatttccggtgatgattttctttgaaataatcttcaaaaatatcgctgatcacccggttttatatccagtgattgaagtggcgattattttcggattgaccgaattatcctaccggtttattgaacagccactagcacactatccgtacaagcagttatggcaccaattgaagcaatttatgcaccaaccacattggaatcgggtggttggtcgagtgactggactcgcaattgtctttttaatcgggttagtcggggcgtttcaagcgccattccaaccggcgccagatacgcataaatcggcattagcggtcaatattaagcaaaatcaaaaagctaaccaaaagcgtaaggatgcgttgattaaaaaagcaaaagcccagaataaagctggacaagcaaatggtccaacttcaaaagctgaaaaagcggctgaggcggctgcgcaaaagcatccaatcaaccaagaatttgaaaaatatggcttgagtcaagtgacgattcaacgggcccagaatatctcggtgactgcaattggtgattccgtcctactcgacggtagtcaagctttacagaagttattcccgaatatgttggttgatgcggctgttgggcgccaactctatcaaagtattcaaattgtaaaagattatgatcaaaaacaagcccttagcgatactgtactggtcagtctaggaacaaatggcgcctttacgcaagaacagatggcgcaatttatggcagccattgggactaagcgaaaagtctattggctcaacgcgtttgtcccaacgcgtccttggcaaaatgatgttaaccaggcgcttaaaaatgcaactaaacagtatccaaacttaacggtgattgattggtattcacaggctgccaaacacagtgactggttctaccaagataaggtgcatccgaacccaactggggtcaatgaatatgccgccattattaccaaagccctcgcggcaaaataaagcgttgaattaaagacagattggaagagctaaatggaattagaatttttaggaacaggcgctggagttccagcacgacaacgaaacgtcacaagtgtcgcattgaaattattggatgaacgaaatgaagtgtggttgtttgacgtcggtgaagcaacgcaacatcaaatcttaaaaacgacattaaaaccgcgcaaagttaaaaagatctttctcacacatttacatggggatcatttattcgggttaccaggctttttatcaagccgatctttccaaggtggcgacgaaccacttacgatttacggccctaagggaactgaagaatacgtgcgcacgagtttaaaaatctctgaaagtcatttaacgtatccattgaactttgtcattcttcctgaagaaggtgttttgattgatgatgcgactttccgggttgaatgtgctaaattggatcatcggattgccagttatggttttcggattattgaaaaggaccatccgggggaactgcaagttgagaaactgcatgcagatggtgttccggctggtcctgtatacgcaaagattaaaaagggagaagtggttacactcgctgatgggcgccaaattgatggcaaagattacattggacatgctcaaaaaggacggattgtgaccattattggggatacccgccaatgtccaccaattgaacgcttagcggctaatgcagatgtattagtgcatgaagggacctttggtaagcaagaacaaaagattgcgcgtcaatatttccattcaactaacattaatgcagcaaaggtcgcaaaagccgcgcatgtgaagcggttattattgacccatatttctgcccggtacctcgggcaagcagtgcgtgatttacaaaatgatgcccgcgatatttttaaaaacacaaaagtagttagtgacttagatatctatgacattccgtttcatggtcgaaaggagtaaacagatgactaaattagcagcattgagagatttaaaccgtaaaattgtggtgattaccggcggatcgtctggtttaggacgagcgattgcctatgaagccgctagtaaaggggcaattatcgtcgttttggcccgtcgagaagctgaattggcggcggttcgcgaagaagcacaccggctttcaggacagccggcgtatgcatatgtcctcgatgtcagtgatccagcagcgattgaaaccattgtggctcaggtgcaaactgaagtcgggattccagatgtgttagtcaatgctgctggttttggaagttttgaaaatgcattcgacacatccatgaccgttgtggagcagatgttccgggttaatgtgctaggtttaatgtacatgacgcgcgcttttgggcggatgatgattgaacaaggtagcggccacatcattaacattgcttcaatggcgggcaagatggcaacgcctaagtcggccatctattcggcaactaagttcgcggttgttggctattcaaatggtctacgcttagaattaaaaccatttggggttcaagtgactaccgttaatcctgggccgattgatacagctttctttgatattgcggataagaccggtaattatttgaaatcggtcgattgggttgttttagatcctgatcaactagcttatcggattgtgaaaacaatcgggcatgcaaaacgtgaaattaatgcaccatggttgatggcgatcggtgcacaattctatcaactggcaccacatatcggagactatgttgccggtaacttattgaataagaagtagggggggcagttttatgaaaaaacaaggtcgattaattacagtattggtcctagcattaattgtcgtaatttttgctgttttaaacgttgaaccagtcgccattaactttggattcacccatgttaaatggccattaatcatcgttattttggtgtcattattgattggcgccatcattaccttcttggcagcgactggcagcacgttgagccaacggaaagcacaaaaggaaatgaccaaagaagtcactgaattacgcgacaatcaagctgctcaaattaaagcagcggttgaagcagaaaaaataaagaatcaaagaacatttgataaagcgttagcggataaggaagctgaagtccatgaattacacgcgaaaattaatcaaatcacacaaacaagtgatcatcataatgcatagaaaaagaggttgagtgaagtgaaccccaaatattggacgaaactttaagcggtaaacaccgtatcaggttatgctgacaaatttgtccaaaaattcggattaaatttgcaatctacccaataaacaaattaactgtacccaacgcagtggcggttacatcatccgcgtcatttcgctctgatgataactcggctcgctgcagtgctagttgctcatcaagccgcagttgttcctgctcttgaatttgaaataatcgattcttcggcaatcgccgaccgacaaaggcgtgggcaatgaaaccgatgattggcaagaacaccagcaccagtagccaggcccaggtcgctgaaatatctcgcggttcacggaacacagtaatgaacgccaacaccgcgtttacatagataattgtttcaaaaataaaatgtgcccagttcatctggattggtcctccaatacgcataaatgctaatttcatcttactcatctttaggaagcaacgcgacccccgtattgtcaatctaagtgcaacagtttctagtctaatcctataagtggtacacagcttagagttccggcatcagttccgccgcactccggtagcccaagatacgacgaggccggctgttgagtgcgtcctggaagctctgaatatcaatgatgtcgtaatggtggagtgagcgacctttcggaataaactctcgtagaaggccgttctggttctcatttgttccgcgctcccatggtgagtacggatgagcaaagtagacatcagttccttctactgaatctagttgtgcgaactcactgccgttatcaaaggtgatggtggtgaagtattccgcaccgtaatcatcaatgatggactgaagtcccaccttacaggtacttgctttgtagttagcgagcttgatgatgatttcgaagcgactcatccgctctgtcaaaaccagcaacgcaggttcgctatcaacgcgcttacctttcactaaatctccttcccaatggcccccttgccgacggtcttgaacttcaatgggtctttcatcaatcgaggtaccaagcttcgtcttattggtgcgggtatgggaatggcttcgtttaattcgcaagttggatttgcgcggtaagtcgtgggtccgtagttcgaatctaccggcctcaatatcccggtaaaccgttggtgttgaaggaacaacctcgtctgcgtgttcccgtttgaaggtgtgcacgaagctgtccacactgtgtacgcgtggacgttgcttgatggcagcggcacaggcggcgtagaactcggggttcttctcaagcatcgtcttggggcgacaccactcccgccgctgagcgtgcagataagctgccgtatcagcaaagtaaatcaacgctaccttatgcccgggaattcgctgtagaacgaagccacgagtgatctcacgcgaaatagtactacgagagcggttgagttcgcgggcaatccgtgcttgggagaatccctgattgagcagagtttcaatgcgaacgcgatcaaaatttgatagttgttggtaagccttagagctggtacgcttgatgttggtcatgatgtgcctttcttatgtgcttggttgcttataagaataggtcatcatggcctttttggtctatttaattatgtgttgcacttagattgtaaacgcgggtcttgaatataaatagcaaaattgccacaatcacaatcaacccatccatcattcttagaccagcaattgtggataactgtgtcatccgactagttaccaagatagtttctgcgattacgatcaagacttttgagaacttagcccatatcgttgtcactgcggaaacattcatcaatgcgtcaacagacgtttgatagacgactgcagcttgttgcaacaataaaacatccggcagattgcgccctgtctcccagttagaaatagcctgacgtgaaacatttagttgtttagcagcctcagactgtgtgagccgtaattgattacgtgccctctttaaattggccgagagaatttcaccttttgtttgcatcatcttcactcctaaaaagtaccagtagcttgcttcattgacgagcaaggaacgcttgcatccgcattagcacagtgtttgtagaccaaaataaaatcataattgctaagttatacattagcattgatgtgaatagacttgtaccatttttttatctacgagtatctggtatttcaaagaaattgtctactatctcagcgacggggccgtcaacagtaagcacagtaactaggcggctgcatttgaagcttgaacagaaagctttgaacaatacttttacacacacagtaattggtgataaattatactcaaccaaacgaacaactactggaggtgcattcatgaaacccgaaatttctaaagatatcattcggggacacacgacgaccatcattcttaatattcttagccagggcgacagttacggttatgaaattgctaaggccgtccgcgaactgagccacgatgcatatgaattaaacgaagccactttatacactgcttttcgccgcatggaacgcaatggtgatatcgaaagctattggggcgacgagactcatggtggtcgccgaaaatactataaactaaccgaacaaggtacccgcctactcgcaaaaaacgtcgcagactgggcgtttgcaaaaaagattattgatgacctgattaccgggaggattgatgacaatggacacaattgatacgatggttaaccggcgtttggatgaaacgtttaaggcttatcctgacacggaagaaatgcatgaattacgtgaagagttggctgctgatttaagtgaggtcgcccacgacaatgaaaaaaaaaggcgccaccatcacggacgccgtcaacagggcttttgaaggattaggcaatctcgacgacttagtggatgaaattaacgccgaaaaaaatgctactgatcaagatactcattccgacgatgccaaacaaacgtcacatgagcatgcctacaatcacggtcaccacatcgatattgctgatggcaaggtaattatcgatggtggtaaggtgctcatcatcgatgacaatggtattaaagttaacggtggcaaagcggtaaatattgatagcgatggcatcaacatcaataacggtacgtttactgtcacaaacgacggtattcggatgggtaatcttgtaatcgacaatcgtggcattcacacggacggcggcaaaacagttgccggttcgtttgcggaaaaaaagcagcaaccacataacgacaagttcgatccccatgccaatgacgacacattttcaaacttcgatcagcaatttaatgaacaagaaccggtcgatactgaaatctacgtggacagtttagtgcttgccaacgaacaacaattttctgccgatcaagttcagcgaatcgactttaagtatgctgacagtagcgtccgaattttaagcaatcccgatgatgatcacattatcttccgggaatacatgaaccgcgctaatgacagctaccttgcacaaactaagttggagaatggtaccctgtcaattcataacggatcacggcctcacctgttaccactgcgggttcgtgttcagctactcattccagcatcctttgcaggtgatttactggttaacagtgcctcaggtagcgttaatttcagccataccggcgctctgaaccaggttcgtttggaggcaaacagtggttccattcgcattaatggtgcccactttaaggatttagatgtcaacgcatccgctggttccgttcgcattaagcaaaccactgttgcggggctattacgtgctcgtgctcatagcggttcaattcgcttggctgacactacggttgctaagttcgatgtggactcacactcaggttctgtccgcggcactgacttgaatggtgctggtgcgttcaacgccaattcagggtcaattagcctaagtttcagtgatctcactggcaaccttgataccacagcgcactccagttcaatcaaactagaattcgctaagggcatcgagtataactttgacttggacgccaaaagtggttctatcaccggtcccgataacgctatctacgatcacaatacgactaacttcaaagatggtgcagttggtgatgacgacccacatttctatgtcaccgcagcaacaaagtccagttcgatccatgtttcttagtctcattaactggttaattgtttcaacatcatgtaatcaaagtaacctaaaacatcacgctgatattaaaaaatcagcgtgatgttttttgcactttatttagttacttcaggaacacgcactaaatcacgtttgatcagttcctgtgcgatttgaaccgcattcaatgccgcccctttaagcaggttatcagcaacgacccacatgtgataagctcctggattttcccggtctgctcgcatccggccgacaaacgtttcgccatgaccagctgcgttaatcggttgcggataaacttggtgtgctggatcatcctgcaatacgacaccctttgaatgagccaatagagcctgcatatctggtacggctggtgtttggttcgtttcaaaataaacactttcaccatggccaattggtacgggcacgcggacacaggttgcagataccttaagttccgtgtcgttcatgtcaccacgtaaaatctttttagtttcgtgaatcatcttccattcttcgtgcgtgaagccatcgtcctcaaagacatcaatctgtggcaacaagttaaacgccaatggatagtgatgttcagcacccttgacaggtaaaatagcagccgtctcctcttcgccttcatgacgttgttgggcctcatcgaataactcgttcattgcccgttgaccagcaccagaagccgcttgataagtcgaaactaggacttgatgcaacttatactggcggtcaattggcgccaacgcaacaaccatttgaatggtactgcagtttggattggcaacaataccatgatgctgactcaacatctctggattcacttcaggcacgaccaatggtacatctggctccatccgaaaggcactggtgttatcgacacaaacggctcctgccttcaccgctgctggtagcaatgccttggaaactgaaccgccagctgacgacaagacgatatcgatacctttaaacgagtccgttgtggcttcttcgatcgtataagattggccacgaaaggtgcgtgtttgaccagctgaacgtgctgatgccaacagcaccaatcgatcaaccgcgatatcagacttttccaattgttgtaacatccgtgtgccaactgcaccagtaacaccaagaattgcgacattaaatgattgcattaaattacttcctttcaagtttcactccactcgatcatttagttaagccgaaacatcaaccgataatttgttggcacgataggctgccagtcgtttgacagcttcctgcaatttgtccatgtcggcggcgtatgacaaccgaacgtggccttcaccaccaggtccgaaacagctgcctggaacaacggctacctttgcctgttgagcgaccttaagtgcaaaagttcggtcatcttgttcctcatccgccggtattttggcaaacacataaaaagcgccatttggttgatccgtggtaaagcccagttgattgagtgcctgtaccagaaaatcacgacgttcgtgatactgagccttcatggctgccgtgtctgctgccccatgttgcaaagcatcagtggccgccgccatcattggtgttggtgcggtggtaaccaaggcgccatgtagtttggcaatatgctgggttagtgcagccggtgccgctaagtaaccaacccggtaaccagtcatggcaaacgtcttggaaacgccattaatcacgattgtccgctccggtagcaatgtggaaatggatacatgaggctggtcgtaggctaattcacaatagatttcatcagccaacacgagcaacttatgcttacgaatcactgcggccaatgcttgcaactgcgagtctgtgtaagtgacaccagttggattggttggataattcaaaaccagcatctttgctcgcggatgagcagccaatgtagccgttagccgagccggtgttaatacatagtcatctgctgaggtatcaaccaacaccggcgtagcgccatcaatctgggcagtcgtaatgtacaacggaaaaatgggcgttggaataatcacctcgtcgcccgctcccaaaacagttcccatcgcggccgcaattgcttctgtggcacccactgttaccaatatttccgcttggggatcgtaagtaacctgattcaatttagttaagtatgtactaatcgcttctcgtagctctggtaacccggcagccggtgcgtaatgagagcgattctgattgattgcatcgatggtcgcctgcttaacatggtctggcgcgttaaaatctggttcaccaagcgttaatttcaggatgccaggaatatcctttatttgattatcaaactgacgaatcgctgatggcacaattttgtcaaacacgggccgtgtcatccccgttaactgagcttctaattctggcatatgcattctcctttgaccgtatcaattcgcggtacgacgctaatctaaaacctgttccaaaccaacctttaattctgttaatgtcgtcactttgctcaatgctagcttgacgccaaccataaatgactcacgatcatacgtgtcctgccgaatcgtcaacgcttcgcccgttccgccaaacaacacttgttcatgtgctagataaccaggcaaccggactgcatgaatcggaacgttgtcgacaatccccccacgcacgccatccacgctgctttcagtatggtctggatctggctgttgttgccgaccagcggcgattgcatgggcagtagcaacggccgtaccagatggtgcatcccgtttatcggcatggtgcatttcaataatctccgcgttcggaaaatacttagccgcctgtttagcaaactgggttagtaacaccgctgacaatccaaagttgggaacgatcaacccacctagatgagtggaagcagctaacgcctgcaatgattttatttgtgatgtcgttaagccactcgtgccaaccaatgggactaacccgtgttgcaaggctacttcaacgttgtgttcaaccacagttggcgttgtaaagtctaaccaaacgtccgcctcaggcaactcgtcttccgtagtagcaacgacaacttggcttggcaaatgtgggtcattcccgtccgttagtgcagcatgaggatcaaacacaccagtcaattcaaaccgctcatcgtttaaaattgactggcagctagcagtccccatactgccacgaaagccagcgacaataacacgaatctttgactcactcattttctataccgcctccgtgttttctgccaacggaatatcgcttagttggtgaacgcctaagcgttgtgccaaaatggtttgctcagtgtcattcagaggaacgattggcaaacgtgggttaccaactggtagtccctgcgcatttaaaacggccttgactggtgatggtgatggatatatgaataacgcagccatctttggcatcaagtcacgttgaatctgaccggcacgtgcaacattaccttgttctagtgcgtcgtattcctgtcgcatcgctggaccatatacgtgactggcaacggaaataacgccagttccacccagtgccttcactaataacgcttgggcatcttcaccactgtaaacggcaaaacctgtcggcgcatcattaattaacgccgccaaatccgcatcactaccacactgtttaacaccgctaatgtttggcacttgtgcaagctggagaatcgtttcgttcgtcatgttgacgccagttcggccgggaatgttgtaaatgacaattggcttagtagcagcttgagcaaccgctgtaaaatgggcaatcatcccccgttgattaggtttgttgtaataaggaacaacgaccaacgttgcatcaatcccgtcaatcgcatcgacttcctgattaagggcaattgtcgcagctgtattattactgcctgtcccagcgataacgacaccacgaccggccacaatctgtgcaaaacgggtatagagttcaatcttttcttcgtgcgttagcgttggtgtctcacctgtcgtcccaccgatgacaaacccgcgtgaaccagtttcaatgagcatatttgttaatcgcgttaatgcctcgaaatcaatatgatcatcttcggtaaacggtgtgatgattgctgttaataaatcgttttgttcaaacattttaaattcctccctattggtgagaactattcggaaaaccaccgaatcatttgttttgcttcttattgctcggattcaaccgaagtcgagcatcactctcttgtcatccgatcctccaaaaactcggtaatggcggtgacacccttgctaatagcggactcgtccggcgtcattttggcagagtgcaacggtgcgtgaccgtccacccctaaccaaaacatcgtgccaggaaattgatgcagcatatatccgaagtcctcgccggtcatggccggtgccgtttcaacaaagtccacatcgggtgcacttttcataaattgaatgaacgggatcgtcaactgcggattgttttctaccggcaagtagccgccctgattcagttcaacattgacttcacactcgaaactcgtagcgataccattagcgattgcctgtaatcgctgatcaatgtgttcaatcatcgcttgcgttagtccgcgaatggtcccttctagcctggcacggccagcaatgacgttacggatactaccggcattcagtttgccaaacgtcaccacgccgctttcaattgggtcaacgcttctagagacaacggtctgcgcttgcatgataaagctggcgcaggcaactaccatgtcgttagccaaatgcggataagccgcatgcccgcccttgccaacaaagtccacgttaatttctgtcgtaccagcaaataacgtgccattgcggcatccaatcacgcctgcaggcagctccggattgacgtgcaagccataaaactcatctggtcgccattcgccagcaaaggcgccagcctcaacggccaacttgccgccgttgtcgttttcctcagccggttgaaagaaaaacaataagtcatcttttggctgatgattggcaaaataattgagcacccctagggccaccgtcatgtgaatatcatgcccacaagcatgcatcttgccgggatttgtcgacgtatatggcaatccagtcgcttctgtaactggcaaggcatcaatatcagtgcggtatccaatacaccgttgcggctggcttccttgaactttaaccatcaaggccgttggcaaacttgggatgtgatgcatggtcaaccattgttgaggcatcgcttcaataacttgccgcagatatgcagctgtttgagtttcatgaagtgccaactctggaatttggtgcaagtgacggcgaatatgaattaaatctaacgtttcagacatgcagtaccagctttctttcagtcaaacgtgctagagctttcgtaacgaatcctgaagtttcgttttagcctgcgtttttgcatcgtttactttaatcaccttagctggaacaccggcaacaacggtattggctggcacatcctcagttactacagcaccagcaccaaccaccgcgtgttcaccgacatgaacgccctcgataactactgcattggccccaatcaacacatcatcatcgatgcgcacgggttctgcagaagccggttcgattacaccagctagcaccgcgccggctccgatatgacaatgtttgccaacgattgcacggccaccaagtacggcacccatatcaatcatggaatcagcgccaatctcagcgccgatgttgatcagcgcacccatcataatgacagcgtgatcaccaaccactacttgaccacgaatgatggcacctggttcgatgcgggcgttaacttcacgcgcatctaataacggaacagctgaattagtagcattggtttccacatgcgtttgcacaatcacatcttggtgtgattcaagaaatggtttcactaccggccaactcccaaacaacgtccccgtgtgatcttccataaacgcttcaatgccatctggaatcgtcagttgacgtaagtgatcgccactaacagtgaccttaaccggcgtttgtttcttagcagtcgctatcgtatgaataatctgtgtcgcatctaattctgccatttgaatcctccttaatgattgcgttaccttacagggcttcggtgccactcttcctaaacgtgcacctgtccgctcaaggccctgtgcacaacccaaagctgtcaccccacaagcaaagtgcgcttgcacgctgtcacctttacgttgttgctcgagccttaccgagcttcggcggcactcttcttaaaatcctcatccaatgcgagcatgtcgcggatggtttcacgccggacgacgatactggcttgtttgtgatcgataaaaatgacggctggacgtggattgcgattatagttgctggccatcgaataaccgtaggcaccagtagctaagagggcaatcacatcgcccgttttcgtaaccggcaacgtcgcttcttttactagaatgtcgccggactcacaatatttaccgacaatatggatggtttctttagacgaatcttccacatgattggccaatactggttcgtactcagcctgatacagcgctggtcgaatgttatcccccataccgccgtcaacagccacgtaaggcaataagctggggacgcgtttgtttgcgccaacccgatataaattgattcctgccgggccaaccaacgaccggccaggttcaatccaaatctccggcatttctaagtgatgattacctaacctggcttcaatcgtcgttaacacggtgtcaagctgggcctccggtgattgtggatcgtcaccttccacatatttaatgccgaacccaccgcctagatttagcacttgggccgaatagccaaacgcctcatgccaatgggtcaacagttcaatcaatttctcggctgccattacaaagccggtactctcaaaaatttgtgatccaatatgtgcatgaacgccacgaacatttagatgatcatccgctaaagcctctttcagtgcctgatccgcttgaccagaaccgatgtcgaaaccaaacttactatctacttgacccgtttgaatgtactgatgcgtatgagcactaacgccgggggtcacccgaatttgaatcgcaatgttttcgtcccgttcctgtagcaaacgttgtaatagatgaagctcaacgaaattatcaacaataatcgtgccaagatgatgatccagtgccattgtcagttcatccacagacttattattcccgtgaaaactcagtcgagatgacggaaaaccggccgcaaacgccgttgccatttcacctgctgacacaacgtccgcatgtacaccgagtggcgccaacagctgatagattcccttcacgcagaaggccttagacgcgtaactcacgacgccatcaattcggtggttagcaaacgtctgttgaaaggccttcacctgacgaacgatatcctgtgtatcgtaagcaaccagcggtgtgtcaaactgctctgctattttgacggtgtccataccaccgatcattaaatgatttgtcgttgagtcaactgttgttgtcatttttttgctccttttagtttttagaagttattttggttgtacacattgtctatgcgcccgacgtcctttcggattggtctgaagtgtgccaatgttgacaaccgaaagcacagaaacatagcacgaaaaaagggggctcatttgcataggtgcgtacgcaaaagagtcccgaaaataaattcatttcgtttctgaatgtcgtaagcgccccgcgatgaatttttcatcacgacagtttgttgattattcgtcaacatcccagccaaagcgatggtcaatcgtccagcttcggcaaccgcccctttcatcagtttctatgtcgtgacccgactccgctgattactcttgttggttgcaacctcttttcacatttaattttaatgagtatatcgctcttttcattacccgtcaagtccccatttaaattttatgttcccaagtaaagcgctgtaccaacgcgtttacatttattttcatttagctattgtaattgaaaactaattcgctataattgtcagtaatcatagaagaggttgcgaagattaaaagtaactaagagtaaaacgacgaggttaacgacgcttagtgaaaggatgattcgccgaaactttgactgactcgtctcagttagggttgggactcgggttaacagcccaaggactgtcgcaactaacaaaaaagttgcggggcgctatctacgaccatacataaccggtactatatcgattacgttcgattagactaagcgcacccaatgacctcgttaaacaaagtcattgggtgcgctttttaaatgtaatcgtgggtgtgaatgatttcagtgtcgattccccttctaacatcaaaaacaatggtctgtttggacaaacaaccgtggtaagcgaggttaggatcgatgaaagtaattaagtttggtggcagttctttggcagatgcgacgcattttagtgacgtaatgcagattttacgaatggataggcaacgccgcgtggttgttgtttcagcacccggcaaacgaaatgagaacgatgaaaaagttaccgatttactgattgactacgcacgtgcgcatggtaaaacacaacagtcgatcggtcagcaaatcatcgacagatatcaagaaatcgcagcagcgtttaatatttcggcagctcaatttaaaccattggcggaccaaattttggccctaccaacgacatcatttcgtggcccagcctttagaatggctgcgtttaaggcccacggcgaaaagttaaacgcccagttactggcgctggtgttaaatacacaaggattaagtgctcgttacgttgacccacacgaactcggcttaattgccacgcaggagccaaacaacgcgaccattttatctcagacatacacacacctggccgttgcccgtcaggagcttctagcggaagacaaactgtgggtcgttcctggtttctttgcctatacaaccggcggtcaactggtaaccttttcccgtggtggctcagatatcacaggtgccattcttgctcgtggtttgcatgcgactgaatacgagaactttacggatgtcgactccatttacgctgccaatcctaacgttgtcgctaacccagcacccattactaagatgagctacgtcgaaatgcgggaactttcatatgccggtttctcagtttttcacgatgaggcaatcattccagccattgaaggtcaggttcccatttgcgttaagaataccaaccatcctagtgcgccaggaacactgattgtaccaacgaatcaatcgcagcctaagcgattaattacgggggtagccagttccaaacgttttgcagcgctctacctgcatcgttatctattgaaccgggaagttggcttcacattaaagttactcaaaatcctcttccgctaccacatcagctacgaacatatgccttcaggaattgacgatttaacgatcatctttgatcgcaatcaaattccgacagatgtcctccctcgtttgctagcagatatcaaagaaacattgcaacccgatcgtcttcagtggatcgatgattacgcgattttgatggtggttggcgaaggcatgcgcaatcaggtcggcgtcattgaccggatcctgcacccactagccactcatcatatcggcgttcaaatgatcaaccaaggggcgtcacggatttccatcatgattggtgttcgggaagcgcaggctgatgacgctgttcgcctcatctacaatgatttctttaaccaaccagttagcttgccacttcgtcaaccagcacaggaggtcactcatggttaatttgattcgggttcatggttcggaaaatagtttttacctgcttgatcaacggcaacttaaacatgcactcaccacagccgaactcagtcgtttggcacaacaagtcaacgacacagcaccagcaagtctgggcgaagtagatggtgtcctggtcgtcagtgacagtcagcattccaacgcaatcggccggatgcaggttttcaaccgcgatggcagccaagcaagcatgtgtggcaacggcttacgaaccgtcagccgctatctcgcagaacaaacgcaccaaacggatttccaagttgaaacagatgtggctgatttaccagttcatcaagtcacgccgtttgcgccagatgtgcctgcattcagtgtcagcatccaacccgtcagtttcgatgcgacttcgattggcttacatcaaatcccgacaacaccacttttaaatcaaaacagcttgccatttgcaacaaattccactgcaaacttttccgctgtggcagtgccaaacccacatttgattagtctcacagaccataaccatcctaatgccttaacaaccgccttcctagggcaactcggacaacaattaaatggtcaaaacccgtggttccctgacggcgtcaatgtcagctttggttgggaaatcaacgacactaccctctttgtgcggacgtttgaacgcggcgttggttttacaaacgcctgtggtactggcatgtcggccacatcgctaatttgggtactgacccacccagccgctcagtttgaccaactcctgaccatttataatccaggcgggatggttcaaacgcgtgtccatcatcaaaacgccgcgtacactatcgacctaatcggcaacgcgaccttcactgaccatttgcgtttgagcgaggctgacttgcacgccgggaacctcgccagtgcagaagtcgcggcaacacaagaagagaccgcctatcatcaattcgtatcacagttaccgcattggtaatttggctatgtccgcccaactgcagacgaacactaagtttgctaaagagggaccggtttcgcagtctagctacgaaaccggtccctttctattgtgatagttattctctacaaaattggtgacaataggcgtgaaaatatttgtttgaacttacgccaatacgattgttgggcgaacgtctcgtaagtcgtcagctcactgacgcgcatatcagcctcaaacaacttagccaactctgcggtaactttaggatcgtacaggaatgcattgacctcaaagtttagtttgaaactacgaaaatctaagtttgccgatccaacagatgcgactccgtcatcaacgaccattgttttagaatggataaaaccgttgcgatatttgaagatttttaccccgttacgagacaactgcttcgcgtaatactcggttgcccggtacacaaacgcatgatccggcttgcttggaatcataatgcggacatccacgccactgccagccgctactcgaagtgcatcaaggacagagtcatctggaattaagtacagcgactgaatccacagccgtttgcgtgctgagttaatcaatcgtaagtagcccatcttaatctgctctttatcagaatcgggaccagatgacacgatctgcatgttggtttcgcccttcaccttagtgatatggaagaaatcattggtaacgtttagtggtttggtacgactggtagcattccaatcacggataaagcgtgactgaagcccgtaaacgccagccccaacgatgcgaagatgcgtatcacgccagtaaccaaacttttctttacgacctaaatactgatcgccgacgttaaaaccaccggtatagccaatagctccgtcaatcacaacaattttacggtgatcacggaagttcaaccggaaatccactatcgcactgcgcgtttgcaggaagggatatgcttccccaccagaggcccgtaatggatcatagaatttgggccgaacacccatcgaaccccatgaatcatataatacccgcacagccacgccggcttccgctttacgaatcagcaaacgcagcaattcgttaccgatgtcatcgttatagatcgtgtaaaactcgatatgaatgctctgtttagcctgctcaatgtcttcaaacatctggtggaacagcactttcccatcagaaataatgtgcacccggttgttgcgagttaaaaaggcttgatcagactcaaggccgaaaggtttaaccttttttgttaccatcagttttttccaagagagagtagtgattaacctgcagctattagctaatgagatacttagtgttactcaggatgtttacgtggcctataaagaaccctactagctgtgagtaggattaagctaagtaaaatataatatagcgcatcgtaattaaaaagccgtttaacagtcccttatgggatggttaaatggctttttgctatgctaaggcgtcattttctgtttcctgataacgttgcaagatgtagattgctaggataactagaattgcaccactcatttctacccaactaaagcgggcatggaagaagatgatacttagaataaatgtaattacaggttgtacggcatcaacgatactgattacggttgatggtgcaaagtttaaactgtgtaacaagcaaagatatgcgaatacagttccaatcaaaataacggctaaaattgcgataataccggaagcatttaaacgcggcggtgcttgccagaatggtcggtggatattgaagagtaaaccactgatgaacatgccccaacctaaaacgagaattggtgatttttcattaacgattggtcttggtagcacaacgtagaaagcagctgttacaccggataagattccccagattaatgaattaaaaggaattgttaaagtatggatattgcctttcgtaatagaaaggaaaacgccaattaaagcaattccgaatgagataatatcaattcgatttggccacttacgtaagaaagcgagggttccaataacgataaacagaggacttagatattgtaaaatagtcgccgctgctgcattccccgtttggatactcatgaagaaagtatattgattacccatgataccgaaaagggcgtaagcgattagccaagccgttaatcgttttgatttaaaaatggagaagatatcttgtttgaacttaattgccccgataagtaataaaattaaaccagcgccaagcgttctaacggataggaaccaagttgcagggatcttttgtccttgcgagatgaattccaaaatagtacctgaaacgccccagagtgcggacgccatagtcgcccaaaacatgcctttggcgatgttttgcggttgagttcgattgttcattgtgcgccatccttttttgaaaatttataactatactattataagctaaatggcgtatttatgctatttgcaaaacttttttcattattattccccacaaaataataaatatggcagtgataaagcgaactggtcaacaaaagctaattaagttatgatgaataaaaaagtgagggattcagatgcaatacattgcgttattacggggaattaatgtgggtggtaaacggccagttaaaatgagcgtgcttaaaactgcgtatgaagcggctgggttcaccaatgtgcaaacatacatcaatagtggcaacgtgttatttgaagccccagaaacaggcttaacaaccttagcggcaacttgtgatcagattatggtggagacctttggcttttctgtgaatatcgccgtggtcacagctgaccagttgattcaagctgttgcggacgcaccaacttggtggggcaatatgccagatgtgaaacataatttaatcgtggcgattgcgcctaaaacgggggcggaattgagtgtacatgtaggggcaattaagccagcgtatgaaaaagttgccgtgaatggtccgtttattttctggagtgcacccgtgaaaacattcggtcggacgcggtggtcgactgttgctaaaggggacctataccagtggctgacaattcggaatgccaacaccgctcgtaaattagtggcactcgcacaggcactacgggaagcatgaagtggttagactcgcatcttcattaatattcatatatacttatagtaataatcaataaagaaatgagggacgcgatgcgcttatccaatttgaaacagacgattatccagatggggttgatcttgattgctctcgaaattattgcgattgggattcaactcttctttgccccccatgaagtagcagccggtggggcaaccggtgtggggatcttattagaagaattgatggggtggaagatatcaacagtggtgtttgtgattaacatcggcatgctgatacttgcttacttcttacttgataagaaaaccacgttaagaattctctttggtagttttatgctaccagtttgtttagctttaacgccccaaatgatggtggtggaagacaaactattagcaattattattgggagtgttgtttacgctgccggaattgccttgttatatcgaattgatgcctcgagtggtggctcaacagtgccaccgttaattttcaaaaaatatttcaatatcaaaccggcattgagtttgctggtagttgatttactagtctgctttgcgaatgtgttcgtctctggttttgagacgttcatgctagcaacttgttcatcaattctgacgttgattacgatgaactatattgagaccgggttgaaccggaaaaaggtcctctatgtcatgagtaacgaccaattacctgaaattaaagcccatttaatcgaagaatctgatgtgggcgtgacgatttttgatgttactgggggctattctaatgacaataagcagatgttgatgctcgttgttgaaaatcaagcctatcaacacattattaatcgaattcatgaagttgatcctttggcatttacgattgtggctaacgtagccgaggtacgcggcggtagtttataaatttaaaaagggtcgagacaattgtctcgacccttttgtgtgttattgatgattaaagtagcgatcagcttttaaattattgatggtgagcatgataatcaagctgatgatatagagtgttgaaatgaagagcatcacggtcatcaccgaataatgatcaagtaaccaaccgataatcacgctcgaaaatccaccgatacagcggccaacgttcataatcacgttattggcggttgcacggacttcggatgggtagaggcgactgacaatcgcgccatagcctgcaaacataccatttgagaagtagccgacaattgtaccgacgaacaataaagcacccatgctattggggaaggttaagatgtaaacgcctgctgctgaagcaatcaggaataagacaaaagcaaaccgtggaccaattcggtctagaatccaatcgaaagtcaacatgcctgctgacatcccggcaatcgtcgctaacatccaagttgatgaaccagccacactgaggtgcatttgttgttgcatgatggttggtaaccagttcattaaaccgaagtaaccagcgatttggacgattgccattatcatcagcgcaactgtttggtaagctagttcgcgtgttttaaaaagagcgctaatctgaccttttggttgatctgattcagaagtgaacgttgtactttcgactagatgatggcggataaaaaaagtaatgataacaggtaataggccgaatagaaatagtgcatgccaaccaaattgtggtaagacccacgctgctagaagtgccgcggcaatagcgccaagttgacctgcgacacccacgaaggatgaaacacgtccgagctgtttcttagggaaagattcggctaagaccgtcatgccaatcccatattcgccaccagcaccgatcccagctaagaagcgacagagataaatcatgggaagggtgtgggcaaatgacatagccgctgtcgcaaaagcaaagataaaaatggtgtaagtgaatattttaatccgtccaacgcggtcggctaaaacgccaaaaaaaacgccacctaacaacattccgatattggtaatcgttgcgattaatcccgcctgtgtcccactgagatgcaaatctgcaatgatggacgatagggtgaaagacaagaacataacgtccatgttttcgagaccgaagccggccgtcgttgaggcgaccaccttagtctggtagcttgttaatcgatgttggctgtgtgccgtaatagttttcatattcagttttcctccaaaaaggacgctctctgtcgtcccttattttgcttggtgccaatcttagcacaggaaagtagtctgtgcaagggtgttatggaaaaagcgcaagcgtcctttgtgatataattgagtttataaaatggctcttcagcgatggagggcgttatggaggttattgaatgactgataagaaaaaacgctttacttttccgagcgcctacacagtaattctacttgttttactggcagtgatgatcttgacgtactttatgccagccggaaaatatgcgagtttacaatataacacgacccaggaaaacttcactgtggtcgcacccaatgggcatgaatcgacagcacctgggacacaagcaacactgaagaaataccacgttaatacggatttagcgaagtttaaggatgggtcggtgtataaaccagttgcgattccaaatacatatcaaaaactcaatcagcataaaccaaacttatttggcgcgattaaacaatttctgaatgcgcccattcaagggttatctgaaacaatcgatattatcacatttgtcttaattctaggtgggattgtgggcgttgtgaataagaccggtgcatttgcggccggaatggcggcgctatcaaaacgtttgaaaagtaaagaagcctggttaatcgtgattgtaacgagcttgattgccctaggcgggaccacctttggcttggctgaagaaacaattgctttctatccaattctagtgccaatctttatggcagctggctacgatgcgctagtcgcaattgcggcgatttatctaggcagttcaatcgggacaatggcttcaacggtgaacccattttccgtcgtgattgcttctaatacggctggcattagctttacagatggtatgggactaaggcttgtaatgctgattctaggcacattaatctgtattttctacacgattcggtatgctgaaaaagtaaaacaggatccaagccaatcgctcatttataatcaaaaagcagaattggaaaaacatttcctgggaaatagtgatgtcaatgaagtaccacggtttgatttccggaagaaattgatgttaattatttttgcggccggttttgtcatcatggtcttcggcgtgaaggaatggggttggctatttaatgaaatttcctcgttattcttagcgattacgtttattttggcgtttatttccggattatcggaaaaagattttgttagtgaattcgttgcaggggcttccgacctgttaggtgtagcccttgtgattgctttagcacgcggcgtgacgattattatggaacaggcacaaattagtgatacgctattgtactggttaagtagtggcgtttcccatatgagtggtgttatcttctcaacggtgatgttcttcgttttcattctactaggattcttcattccgtcgagttccggtctagcggtgctatcaatgcccgtcatggcaccgttggctgatgtagtcggtgttaatcgtgacgttattattagtgcttataactggggacaaggcattatgtcgtttatcacaccaactggtttggtcttggcctcgctggcaatggtccatgtaacgtttgataagtggttaaaattcgtttggccattaatggcgattattggtctattagcaattattttactcggtgttagtgtctatctttaaaaaaacggtcaaaaaaggtccgccacaatcgtggtggaccttttttcgtgattagtaaactttaaatttcgttactggccagtagcggagtttgacaacgccttgaatcccgttgaaggttttagaatcatcactgacaaagcctacttcttcataccggctatcctttgaaacagtccggttatcacccatgacgaagtagtggtgggcagggactgtggaacgaccaagcacgtcctttaaatcaaagtttggcttattagtctttgggttgagtgtgaagtagtttgacccggctaggaaggttgttggatcttttttataatcatttaaataaggctcactgacttttttattattaatatagagttgatccttgttgaagcgaacagtttcaccgggcatgccgacaattcgtttaatgtagaattcacctggtgaatcaggggccttgacgataacgacgtcgccgcgtttcagtttcgtatggcgtagtgcaatgacccgatcatactgtgtaaagttgggttgcattgatggcccgaaaatttgttcattggcaatgacgaatttaagcagtaattgcgcaatgccgaccatcacggccgctaataaaatgatttgtatagtggatttccaaaattcttttgctttagctgacatatcgcacatccttagaattcaatagattcattgtactacaattaattggtagatgacaacaaaactgtacagttccttaactatttaaacgatcttttaaattagggaaacgccgcgttatttatcacgggaaacggttcgtggtatactgaaagggattattttaaacgacaggaaaagtgagtttaacgcatggcgaatttagtaattgtacgacatggcgagagtttagccaatcaattaaatacttatactggttggtctgatgtgccattaacggctgctgggcgcaaacaagcacagcatgtgggccgacaaattcaagcaaccggaattcaattcagtcatgtgcatacttcgttattgaagcgtgcaattttgacgagttacattattctggatgaaatagaccaattggccattccaatgacgaagagttggcgattaaatgagcgccattatggggcattgcgcgggttaaataaggaaaagacgcgggctatttttggtgcgcatcaagttgcccgctggcggcgtagttacacggcggtcccacctttattgacgactttttcgcaggcccgtcgttatcgactagttccaccgatgagtcggccacgcggggagagtcttgcacaggcaacgcaacggctattaccttattggcaagatcaagtagtgccaggattacttgcaggccaggatcaattgattgtagcgcatggttctactttgcgtgcgctcattaaggtgatcgaacagatttcagatcgcgatattgatggtgtggaagttgaaaatggtgaagcactgtattatcgattcgatgctcaaatggtagtcattgagaagggacgattagcggactaagcggatggacaacaaattgaaaagaggactgctgttggtagggctcatcctactaattattggcggcacgatttatcatgaacggcaaaaatatgccgtccaaactcaacaaacccaacaaaaaatgaaacaacttcagcaacaattacaggcaacaaaacttgagttagccattcaaaaggcaaaaagtcatgaagccgggattgatgatcgaaccatcaatcatttgagtgcgaaggaacaacaatttgtacagcagttgctatatgataacagttttagcgggaccattttaattgtgcggcggaatcatgtgttatttcaaggtggccggggctatgcaaattttgcgactaagcaactgaattctccacagacgacgtatcagattgcatcgattcaaaagtcattaacggctgcgttattgatgaaacaggtgcaagccgggaacatcgatttagcgacaccgttaagtcggtattacccgcagattaaagaggcggatcaaattacgctgaagatgatggttgatatgcgttctggactgactgaattatctgcgccggaaaaagaattatcagatcaagcgcggattcaatatgcgcttgatcatttggctgttaaagatattggtcagcataattattcgccagttaattaccttcttttggccgggattttagaacaagtcacccataagagttatcgagagttagttggaaatcagttgataataccgtttaaattaacatcgtttaattttatgccaaatgaaacgaccggccaacaagcgactgcttatggctatcaacaagacggctatggcacgccagttagtgaaccaagttacgtatatatgcgtgagttagggaccggaaatatgtatgccacaacgagtagcctctttcgaactgaacaggcgattgttcaaggaaaagtttttaaaaaatcgttattaaaaacgctccgctcatcgactactggtgaatatacgggtggtgtttataattacaaagattattttacaagccatggggtcgaatctggattcgaatctagcttacagatgagtcagaatgggcgttcaggaattgtcttattatcgaatcaatataaggccaatccttcaattggacttctaacgaatcaactttataagcagttaattacgctcaatcgttaaaaaagcagcttggcttaatgcctagctgctttttgtttggactgtaaaatgatgttgtgcaagtgtccaaaggccaaacccaattaaacagccaaaccagtttaagaggatgtcactgagtgcgaaagtccctagataaaaggcgaattggagaatctcaatgcctagaatcgttaagagcgctatgatgttcgtttcaacaaatgaggctttcaaatggtacaaaccgcctaatgggatgaagtaaacgacattcagtgcggcttcgagcagtgttttgtgatccttttgaatgaaatcgaacgggttcaagctaactgcatgatagacgtttgctttggtgaataagataatgaataataagagcagatagacgctgtagacgagataaccatagattggcgatagttgtcggcggtcccattgcacccagcccaaccaaaatgtaagggttaaaaatagaatcagaaaaagcgtcgttgctggaaaacgggccataacccgggttaagcgtggataactgttgagtgttggtaagacaatgtgccacacgaagtagcgacttatgaggtaggcgaccacaccggctaaaccatattcaagtatcttgcgcattacgattcctccagtgattatagtttggtttgggcgaggcgtttagtgaattcagccataaagtcaaaatgttgtgtgtcggctaacgtatcttctaatttatttagaagttcgttgagcgcttgttgttcgtcgggggttaggctaccgaataaagtctccgtaaattcattgcgaccatcgagggcttcttttaaaaccgctcgacccgccgctgtaatgaagacgtgggtgattcgccgatcatgatgatcgggccgccgattaatgtagtgtttagactctaatttgtgcaagcattcggttagggatgaaggccgaatatcgagactttcggcgagggctccctgcatttgtccgttttcgatattaaggcgttttagaatgcgaatttggctgactgagcgatgatcggatgaaaattgcatgccataataatggcgataatggtgaatcaccttattgaaagtttggaaaagctcgttagatagctcggtcatggggactccttaataaagtttaatttgagatgctaatacgggtataatacgtcatttcataaggtggagcaatattgctcaggttttatcaagggtgttgtgaataattttacataataaccgaaaaaaaaacgatggttaaactgagtcagttctaaccatcgttttggggttgttattgggctgcttttaagaaatttaatgcagctgcataatctggttcgtctgtttgttcgataattaattcggtgtagctaattgtaccatctgcttccaaaataaagattgagcgttgaagcgtgttgttgcttggaacgtagagttgcattgctttcccgaaactgagtgcctcatcagaaaggagttgcatgttcttaacgccttctgcagcgcaccagttattttgttgttcgatggtgtttgttgaaattgtgtagaaatggacgtcttcgaattgatcgacggcttggttaaaatgctttgtttgaatgctgcaaacacgggtgtcaatgtctggcacgacgctaattaaagtccgtttaccgagcaattgcgcagaagtcaccgtttcgccagcggcatttttaaggtcaaattggggtaactgtgtgccgacggctggtggtgtgccgattgtatcgagtggttgatcatgtcttgtgatttgcatttgcataaacctcatttcataataaaagatgcttttattctaagctgattgtgctgagaacacaattaatcacgctcgaggagtatagaaaatgttacgtaaaaaaattcaggcactatacgctaaaaagatgctgaaccaaattatcaaagaggtcaatgtcaaaccgctcatttatgaaattgtcgatgcaagtgggactgaaaccgcggttttgctaagtcatgagcaatgggttaaaatccaagccgcgttaaccgctaacaagtagcgtgaattcccgatttagacttaatacggtaactaagctgtaacatttctgtaatagttgaatgttacacttgttcttggttggaaaaccgtacataagttaagtatttttaaaaatgataaaggggaatcattcagtgaaaaaagtcagtcgattaatgttcagtgcactagcattcttaacaattgggtcaacaatggcggttagcattggtgcagtcagtgccgatgaagttgctgatacaaaagcatcaatgacaaaccttagtgctgaaaactcggctttattagctaagttaagtgctgcacaagataaggttgcttcaatcgatagccaagtgtcaaataagaccgttgcaattgatgatgcacaaaagaacattgcatcaacggacaaagaaattactgaagtggctcaaaaaatcgttaaagttcaagctgaagtccaatctagaaaagctgttttaaaagaacaagtaattgcgcttcaaaaacgtgctggggatagtgtttctggaaatgtttacgttgacttcatcgtcaatagtgatagtttctcagatatggtcagtcgtgcttcagttgttggcaagttaaaccaagctaacaaggaagcaatggacgccgtagcgaactcagaaagtaaattagctactttaaaacaagaacaagtgactaaaaaagcaaacttagttaacacaaaagcacagttagaaaaagatcaagcacagttaacatcacttaaagcagatgcagaaaatgaacaagcaagtttccaacaagaagtggatggacataagacacagcttgctagcttacaaagtcaattagatgctcaaacagcagccgctgttgaagctgctaaaaaagaaactgaaaaagcaacaatcgcaccaacggttgcacctaaaacaggttcagacaatacaccagcaccaacgcctgcaaaaacaacgacagttgcgccatctggtgcaaacactggttcattagttggcaatgccttacaattcattggcacaccgtatgcatggggtggcgcacaacctggtggttttgattgttctggtttagtttggtacgctgctaagatggccggcattagcttaccacggacatcacaagaacaaagcacggttgggacaaaagtgtcattatcagaattacaacctggtgaccttgttttctggggtggcgttggttcagcacatcacgttgggatctatatcggtggtggctcatacgttcacgcaccaacagaaggccaaaatgtaacaacgatgtcaatgcaatattacaaacctgactttggtcgtcgtttataagattaaataaaagaataaaaaagtttggcgtctgcttaaattaagccgccaaacttttttatttatttaaatcctgaatagaagagtgtgaatgaatagtgacaaaacaactattagtcattacgggcgccacgggtagtggcaaaacaacggtgagccattatttaaaagaggcctttcaaattccacaagtggttacccataccacgcggcctagacggcataatgaagtcgacggggtggattattattttgaaacaccagacaccttggcacaaaagcacctcgttgaatcggtgagctattctggctatcaatatggctcttcacatgaagcgttagatttggcgtggcaaaaagcacagctgattagcctagttgttgataccaaaggggcacagacttatttagagacgttccccgaagaagcatcggtcttgttcttaacggtttctgaaacagatgcgttgattacgcgccttgaaaaacggaaggatagtcctgaagcaattcaaaaacggattcaaagtgctgaatttaagcgggatctgatgttaccgagtcatttaaatcaacgggcaactgtgttggttaacgatgactgggaaacaactaagcaagccttagcaacattaatcgcaaccctaaaaaattgatcattgaaaataaaaaggaagcctgtcgaacgcgttcgacaggcttccttttaacgtatggttaacccttatgcaaatgagtgttggttaaccgaattggtttgtttcactttataactgagtttttgtacggcttgttcaattgtaataccacttgcgctgattttttcattgttcgttgcagttgcgataaatttttgagtttgcgtatcaagtgaaacatgataccaattattagtttgactagtaaattccatcgtaaaatctcccttcaaatgactataaatactgatagaaggctaatgaagacgatttcttaaaaatcatctgaattacatcataacgcgcagcctgagataatgcaactattttgtattcggattcattaaaatttggtgaaatttagttgtgcttagctaacggttatgggattaagggtataatggtaaatagtgtggggtaacaactaaattgaagttggtagtaacaagcgccagcgcctgacaacctagaaagcatgtgctagaatggcgtatcgattaatcgagaggagcggatgtattaaatgagcgaaataaccactgccattgccgtattacgcgcaaatgggtacaaaattaccaagcaacgccgagagatgctacagtatttatcgggatatgaaaatcgctacattcccgtgactcaaatcgacgagcatatgcgcgccatttttccgggaatgagtcacaatacgatttatcgcaacattaaagattttgaacaacttggcttagtagaacaacaaacagagggtgaacaggcccacgttaaatatcaatgcgattttgaacatcgccaccatcatcactttatttgccgccagtgtggcaaagtgattgaattgaaaatgtgtccgttagatttttttagtcagcaaattccaaattgtcaaattgaaggtcatcagttcgaactctatggcctctgtgaagactgccaagcataatagaaagggagcgttaaaatggcatatcacacaccacccattattccaccagccgccattatttcgttaattatcgcaatgagtgcgaccaacattgtggcaaatacggttaaacctgttgaaaacaccaagacagagcagtcgtcatttgtttcaagtagtagtgcaaccacaggttcaaccagcagcatgaatacatcaaaaccagaatctgagtctgaatcggaatcctcatcgacctctgaatcaaccgttaattcctcttctaaggctgtttcaagtcaggatcggacggatacggatgccaactcacaatcatctgatgatgagcagacaacaacaccacaaaatgatgagtcagctaacacgaccacggcaagcagtagctctgctaacacaagtagtagcgctaaagtggtttcaagtagtagcagtgccactgctacgcagtaataatttgttttacgcgcaataagggggacatttatcgtgttaacttttttagacattattaaccattatttcggttacttaaatattaatggtcgcgttaaaaatcgccttttttcagttatttgtttaattggtgatttttatcttctatataagagtgtgacctactttaaagctcaagcggttggacgaggtgtgattaacctcctcgtctttttggtgttattctattttgcagtgatgaacctgtatttctattatcggggcaaaaatgcggtcatcgatatttcaccgtatattgaaaaagcgctgggtggtgatccaaacgcgccacatccactaaatggggtaaccaccaaaacgcaagtgatctcacaaattcaaccggccactggcttatttgaagaacaaaatctcttgcccgcgcaactgacaatggacgcggaacaaacccaacgtttaggatccttgattaacgaactgattgaatctggctatcttagcttgaattacgcaggcttaagtgataatgatatatatgaacaagcgcaacaattgcagcgaccaatttatgcgattgggaatcaagttgctttaccgttttatgaaatgaaacaagaagcagatcgttgggtgctctatggggggattaacgccattgccaaacaaccgttagcgcagattacgacggttggcttaaccccaatccaagacctagcccaagattatcaacttgcagtcgcccatacttggattacgggtggcccgaacaagatggccgggcgtagtggcgtggttgaaggcaatgatccctatcaattagtggttcagattgcgtaccaagaacgaacaaagtagtcagtggaggaaaataggtggagattcataacgaattcttagatgtcaattattgttaccaatactacctactagaattagtagcggataacggcaattattacttaacaaaataaaaaaacttcgcctacacttaaaatttcaaatcccttgtatctcattagggttctacaattttaaacataaacaaagtttttcaacttttatcatttaatattcaacgaattaataaattgataatccacatatcggccttctccactattactattggaataacgactgattaaataaatattcttctgcttcagtttagcatcgacagaaactttaatatcgaagccactctgcgccgcattatcaacagttggatagacagctgcgacatcatttcgagtaatcctattaatgcgaacccgtccaatttctttattatttgctttattcattatgatgataaaattattatttaagccttgaacgttcttagaaatatgccatcccgaaatatggaggatattaccattttggataagttgatcaatacttcctaaattacttgggccttgtggtacgttaacaacattaggaaattgatagtcaacataatcactgttaccattcgtggtacttgtatagcgactaataacgtagaaattcttgccttctaaactcttatccaccgctaattcagcactaaaaccactcataccagaattatacacattaggatatacactatgaacatcatttctcaatgaattattaactttcaagcgcttaatttctttattagtatcgacattcattacaatcagataatgcgtattttttccttgtgcataatcactcgcatgccaaccattcattgaaattttatttgaattaactttaacgttatccaaactacctaaattttgcttagttggcgcaggaacttttacagtattaccgaaatcaaagtcttttgcactcccttcaccgcttggtaattgtgcataacgcgatataaccctataggtatgtccatacattcctgagtctactgggatgttggcattaataccactcattgctgccgtgttaatagacggataggcatttgctacatcatctctcctaccacgattaattgcaatccttttatgttcttttcctgtattggtatcaattagaattaaataactgtacggtaaattattggcatcattaattgcatgccaaccaagcgcaaggatattattgctatttgcagttaattgatcaaggctaccgacattatccgttacttctcgatcccaacttgttaatccatactgctcaatcaaactgtttaacaaagtatcatagttaggcgctgtagcataaccgtcttgtttcaaaagactcgttacctcacgataattagttttccacaacaaattatgatatcgtgaatttaccgccaaaaagttcccatgatcttcgatactttcattccaactattgtattttctaaattgcgcattaactgtaatccactgaccattaatatattcttgagtgggcattgttacgtactgaccattgtatgttcccttaattccaaataagttattaccatacgttgctaaagtcgattgcccccaaccgctctccaagattgcctgcgcacctgaaacagagggtaatacaccatacttgcgccatgacgaaattgcaccatcatgaatactactaataaaactggaggtatttcgtaataaattcattgaagctctggaggtatttcgtaataaattcattgaagctggcgtacttctttgacttactttaggcgcatcataaaccccaggaccaatttcattattttgctttacagtaacttcttccttgttctttgtttctgctgctgattcactatttttaattacaccggattcagttgaattatcggtagatggcttttgttctttagaactttgactacttgctgatataatactttcattactgctcattaatgcaggggctgtctcttgtttttgttcagccgctgatactcgttgatttgttgttaagccaattaaaccaatcgtactcattaaaatactattcttaacaatttttttcacttcacaagtcgctcctagttagttttttcagacatactaataatacaatacaattacttaaaacactatttcgttttagttacaaataaaaaccgaacatcttatccacacggttaagacgttcggcaatattttttagatgttcaaggcattgtcaaacacgtaatcaaccgtatttccctcacctgaaggattatctgaataacggctaatcacatatattcttttgttaaccaaactgttatcgatattaaacgttaaaccaaatccactgtttttagagccgtataatgttggatagacagcagctacatcatttcttaaagaacgattaattttataacgccgaatttctttgtttgttgtcttatccataataattaaataactatacggtttattaatcgaagcattagcagcatgccatcccgacattattacggtattatttacacgagacaattgatccatacttgcagcactttcaataacttgtttcttaggaactccaatttgattaatgaattgataatccacataatcagcatcagcatttgccgttgctgaataacgactaatgaagtaaatattcttgccttgtaattgactgtcaactgggatatctgcagaaaatccgctcagccccgccttatatagatcgggataagcagcagctacatcatttcttggtgagttggcgatagtcatccgtttaatttctttatgtgtattagcatccattacaattaaagtgtgaacattacggccttgtgcatcatcatttgcttgccaaccgctgatgtgaacattattgaaacttgccgttagggtgtcaatactccctaaattttgtttaacaattgctggtactgttacctgattatcaaacgaatagtctacgtatgctccttcgccatttggtgtacttgagtaacgtgaaattactttatacgtattaccgcgcatatcatttgttactggaatactcaaaccaaacccactttttcctgcattggcaatattcggataaacttgtcgaacatcgtcacgttgcgtacggttaattgcatagcgcttatattcacggcctgtcttagcattaattacaattaaataactgtatggataccgactagaatccactgatgcgtgccaaccggacattgataatgtcttcttatcagcagttaatgaatccatacttgctacactggtttcttgcttaggtactttaataatatttctaaatgtgaaatcaacagtgtcggtattaccgttgggatctgacgagtagcgagacataagaacgtaactcctattatgcatattattatctaatgtcaatgtattgttaaatcctgaatgtaatgaattggtaatgttttcataaatgttatgcacatcttgacgatttacacgatttattttataccgttttacttctttatgtgtcttactatctaataagaataggtagctatatggccgattggctgtttgctgtgctgtatgccaacccaccacatgaatttcattttcagacacattaacactgttaaggctcgctttatttgcaggcatttgatcataataatgttgcactaatgcataaaattgattcatgtcatacccatattttgcaaagtaagcatctggatcagtatggtctgttccaccaagatattgtgtaacattatgatgtgaccagattgtaccaaccccattatgattctgtgccaaagatggcgttaaattatatttgtttaacaagtaagcagtgtaccacgctgagtaactcgttgtcttagcaaaatcttcgaagttacgagccgttaccatttcaaattgggcaaaatatttattaccaactgccccactaccccatgcaccataatctgtatcatgaatgtttaatattgtcctagcatcaataaaggtatgaacaaatgctgattgccacccaccattaatctcatagtctgcttcactccgagcactataattattagggttatcagtataatgaacaaccactccgttaggacgattatcatctgttttataattaaatattgagaatgtatgcaaatcttgcgtaatgtttggatgtaagtagttgtgttgatatatataattattgacacttggatagttgacaaagaaaaaattgaagaagcgtgggttgtgttgatatatataattattgacacttggataacctgctttaggcataatcgcctttttaaccttagatgaatcaataggcatcccaatatcgtcagtcttcgcttttttctcttttataggtgttgcttcttttgtatcttgactatttagttgcgttttcatttcatctggcgttagcacttgtccagcttgaacattgtttgtagcaaacaaaaaggtcgccgagaccattgtaaatccaattaagaacttcgttagttttctattcattttttcccctctagaatccttaattaacttccacgtagaatattaacataaactttaatatttttacagtctgttcagcattattaatcatataaacatttattggctattaatcaaaaaaaacgtcctgaaccttatcggttcaggacgttttaattatctttccaaataaaactcaaatcgttcgcccacatattgggtgcggacatattcgaaaggttcgccgtttgataagaaggaaacttgtcgtaatttcaagattgggccattacgcttaatgtcgagatattcggcaattcgttctgaggcgagttgggctgagacggtttgttgtgcaccgcccatttcgtagccccctttttcggctaatgctttatagaaggaagacgtgatttcagctttactgaaatcggcaactaagctttgtggcacggttgccacttcaaaacagatgggcacattgtcggcatagcgaatccgttccatgcggagcacctgctcgccatcttttaactggagcttttcagcttcgctaagtgatgggttggcaatgtggaacgaaatggttttactagatggctgcttaccttgggccgtcattagatcggtaaaactggtcacgccggacattttttcttggactttccgattagcgacgtaagtcccagccccaatccgccgttccaaaatcccttcgtcaactaatgtttgtacggcttgccgtaatgtcattcgtgagacttcgaaatttaaagcaagctcccgttctgaaggaattcgatctccaatcgaccacttgccggcttcaatatcctttttaagttgattatgaatttgaatataaacaggtgattccatgggacacactcctaaatattaatgttgatagccgttcccaaagctgtaagttgcgactaagttttgctgatggtctaagatgttgaaatcagcatcccgaccttcttctaatttacctttttgtgttaagccaaattcttcggcttggttgacacttgacatcataacggcttcaaacgtttcacaacctgtgaatgtttggatgttcttgaaggcatcgatatatgttaacactgatccggctaaagtgccatcttctaagcgtgcttgtttgtctttaacaatgactttttgaccgcctaattcgctttcgccttcagcaatccctttagcccgcattgaatcagtcacaaggtcgatccgttctgcacctttttgttcgtaagctaatttaatcatgtcaggcacgatatggaaaccatcagcgattaattcagcgtacatgttgtcttctaacattgcgtgacctgtcacaccaggttcgcggtgcttgaattcacgttgggcattgtataaatgggtaacgtgcgttgctttactttcaagcatttgttcacgcgttgcattactatgaccaactgaaggcacgatgttgtgtgctaaacagtagtcttcgaatgcttttgaaccaggatcttctggtgcataagtaattaaacgcacgcggttacctgataacttattccattcgtccaataaatcaacgtctggatctttgatgaattgttctggttgagcacccttgaagattggtgcgatgaatgggccttccaaatgaacaccttgaattaatgggttcttttcagccgctgctttaacaccgcgcatagcattagcaatgttttcgtttgattgcgtcatcgttgttgcaaataaggttgtgaccccttcattttgcatcatcttagttgccatttcgtcgatttggtcagcatcgccgtccattgcatcaaaaccataaccaccgtgacagtgaacgtcaataaagccaggaatgattgtcttgcctttaacatcttgaatttcttcgccagcttgtgccttgtagtcgaacatggggcccactgccaaaattttatcatcgaaacgaatataaccgtcttcgataacgtcgtcacctgtatagattaccgcatgttttaatacttttactgccattatccatccacctctatctttaaattacctctagtataaatggtatagaccaaaaaaacaagggattccgactaaactttgaaccgttttcttgttaatttgctatactatatttatccattcatattaaggagtttaatgatgttaaaaatcggtgttattggactaggaaacattgcacaaaaagcatatttacctgtaatggcgcagatgcaagaccgggtcgattgggtcttatgtacgcgccaaccggctaaattagcgcagcttcaagcgcaatatcatttagaaagtggctgcctatcatttgacacattactcgaacaaccactcgacgcagttttcattcacaccccaactgcaacccactatcaatatgttaaacaagccctgctccatggtttacacgtttttgtcgataaacccttaagtgaaaatccactggaagtcgccgaattatacaaacttgcggctagcaaagaacggctcttaacggtcggcttcaaccgccgttttgccccatttttgcaaaaattaaatcacttacccgataaacaactgattaacatcactaaaacacgcgtggcaacgagccaaccaacgccctttgccatttatgacctgatgattcataccattgatacggcgcttttcttggctgattcactaggtaccaattacaaaatccgtccatactgtcagcaggatgcaaacggcaatttgcaactcgcacaattaaccattgaaacaccgcgccaattaatcagcgcgactttaaatatgcaaagtggtaccaatcaagaaattgcaagtctccagacaccacacgggttattcactgtcgataatctaacgcgctacacaacacaagcggcagaagacagtcgcattcaagttgcagctgactggacgtctacgcttgaaacgcggggctttgcgccaatgattgatgcgtttattactgcccttgaaactaacggcgcaaatcctgtcccaccagaaagtagcttactcacccaccaattctgtcatgagatggtccattttacaaaataatataaaaaagcgtaacccaatacagtatttgtatcaggttacgctttttacatgcttgagcgcactctatttttggctttctaaatccttcgcaattgttgcgtcgatgcctttaaccactgctgtcattaagccggcttcttccattgctaataagccggcgacggttgtgccacctggtgatgaaacttgatccactaagtcccaaggtgaatcatcactcataagcacgttttgggcactccctaaaacagcttgggctgcaatttcagttgcggctttctttgttaaaccgtgtttaacgccggcccgcgccattgaatcaatgaataggtaaacaaatgctggtgaactaccggcaagcgcactgaaagttgtgaaatctttttcgccgatttcaaccacgccccccagttgtgcaaggacatctttcacacgagccaattggtctgcattgacttgttcattcccaacaacagctgtaattcccgcgcgattggccacgttaacatttggcatgatgcgtagaattggtaaatctgcagcagattgttctgctaatttatcaagtgataaacctgctgccattgaaaccatcaatggttgatgtgctttaaaggctgcatttgtttctgctaaaacctgtggcacaatatatggttttaccgctaaaaaaacgatgtcggcttgttcaaccactgaattgttatccgcaacagctgtaatccgttgttcagctacaaaatccgcatagttcgccggatgtccgccatgcactaaaatatccgttgttgcgacttgattagctttcactaagcctttaatcattgcttgtgccatgttaccgacaccaataaatccaattttcattctgccacccctttttttatttatccaaggataccgaacgagcggaggaaagtcaatccaggacacaaaaaaagacatcttagcaagatgtctttaaagtattgggctagctggattcgaaccagcgcatgacaggatcaaaacctgttgccttaccgcttggccatagcccaatcaagtggaggagagtggattcgaaccaccgaacccgaaggagcggatttacagtccgccgcgtttagccacttcgctactcctccatacgtttcatctcatcgattcaactatattagtttacaaaattctgacagaaaaatcaaccccaaaatgcaaaaaaaatcttgattattgcataaataatcaagattttttctaatatttagttaacgccttccattaacttatgaattggtttaacgaagaagattaagacgatcccgaagatggcactcacaatcccaatccctaagaaatatctaatttctgtttgtggtgaatataaacgcacaagctgtgcattaattgcttggcccgcagcatctgctaagaaccacatactcatcatttgtgattggaatgcctttggcgctaattttgttgtaattgacaacccaattggtgaaattaacatttcagcaatttcaacgatgaaccatgaaccgattaaccagaatgggctaactcggccagcggtgccgtgtaataatccaggaagtgccataaacatgtatgataaaccagcgaagattaaaccaacagcaaatttaccaggtgcagatggttgtttcttccaagcactccataaccatacaaagaatggcgttagaagcataataaatagtggattcaatgattggaaatttgatgcagctaagctatgcccaccaatgtttagaattgtccgatcttctgcaaataaagctaggacaacggagccagattcttcaattccccagaagatagcagctgcaataaagagtggaatataagctataacgcgtgaacgttccttcttagtcactttcttgctgcccaacatccgtgagaagtacacaattggtaatgcaatcgcaatgattgaaatcatcaagacaatgttatcaatgtttaagttgcctgtaaattgcatacctaatactacggcaacgacgaccacaacaccaatcacaattttacgaataacgcttgataattcttctggcgcaattggatcattaggttttgaattttctttactgaattgagaacgaccgcggtagtattggattaaaccaaagaacatcccgacagcggctaatgagaagcctaagtgaaaatcaattttttgaccgacagccccaacaagaattggagcgacaaatgagcccaagttaatcccgaagacgaacatactgaaaccagcatcacggcgacgatcattttcactatacaaactaccaaccatttcagaaacgtttggttttaataacccagtccctgcaacaatcaaagcaattgaaataaataaagctgtcgcacccatcggcattgctaaggcaatatggcctaacataatcaagacaccaccgatgaagacggttttgaagctcccccagatccgatcacttaaccaaccaccaacaacgctggctaggtaaaccatcgaaccatagattgccatcacagacattgcagtcgtcttgtcaaagccaagaccacccttatctaaagcaaaatacatatagaataatagaattgcacgcatcccgtagtagctaaaccgttcccacatttcagtgaagaacagtgttgatagcccatgcggttgcccaaagaatgttttttcttgtttctcttccattgtaataccccactttaaaactttattattacggaaactaagaatttgatagttattaaattgaatcgactcatctatacaagaagtctcttatcattcgcttagaatctataagggctattataatcttattttaatcttaaatcaattcttttttcaacattaactgcattgtttgcactgattttttcattaaaataagttattttatgattcaaaatgactaatgcttattcttaaatgagaaaatgctcatgatacctaacatgttcttagaaaactggtttgttgcctttaaacagtagtacaatgaactaatagaaagcgagctgattccgatgaacccttttacactaacatctcttattccattacgacctgatcgttggctaacttactacgaagcaatgtatcaaaatgaacacggcgatttaatgccttatcattttgtcagtcgtgactctaacttaaccatcgagactttaaaacgaccagctaatgcctcagcggttgcaatgttctgctacaatcaaaatcactcacaggtcttactgactaaacaatttagacagccccttaatgattttgtctatggtaatcccgccggtttagttgaaccaactgagtcgattaaacaagccatttcccgtgagttaatggcggaaacaggttactctcttattgaggttgaacattgctttgcgccaagttattcctcaccaggccttactgatggcgccgttagtctagcaatctgtactcttgatcaagctaaacaaacagaccgtacacttgaagtggatgaagccttaagtaccctgtgggttaatcgtgctgaagcacagacgatcttagccaatgaaaaaatgactggacgcactcagattctattatggcaatgggcaaatgaacaataagtaatagccagttacgattttcgtaactggctattttagtggttgcttttcaatcaaattgaatattaaaaaagcattatactaacaaaacgtcagtacaatgctgattatcccgattagcacttggtagaaacatgctattgatgccggctgcaggagtcgaacctgtgaccctcggtttacgataccgatgctctaccaactgagctaagccggcattattgatgacccgtacgggatttgaacccatgataccgccgtgaaagggcggtgtcttaaccacttgaccaacgggccgaaataaaaaacgattgaaaattctcaaccgttcaaatttattaaaagatagtggactattaatggcaatattggggtatcatgttaattgttatattaaagaaagcccgagggggatatatatatatcatgagtaaaaatagaaaatctattttgagtgtaatgttattaataataatattattagctattcttgtaggattgtctgcctacgaggggctatatccgtttggtaataagttatggatacgagcagatagttatacgcagtatagtatcttttacaaatacttaagacagcaactagtacataacggaacacttctttatagttttaaattgggattaggaggcagtttctttacaataatgggttattacttaatgagcccactaagttttctcgttgtcctttttaaggatagtcaaattatgctttttatgacaattctaatcatatctaaaatcgttctttcaggtattacattttatttgtttatcaataaaagaataaaattagactatgtttatcgcttaggattgtccatagcgtatgctttgatgtcatttaatattatttatgcatttaatgtaatgtggcttgatagcataatattaataccaattgcgttaatgggtgttgatcatttgatcaataaaggtaagatatggctactaacaggcactttaacactgttattcatatctaatttctatatggcatatatggcaggtatcggtatttttatatatttcttagtagaattaatagtccttcaaaatagagtgaaatggaaatctggcattaagtttctaatttcggtaatacttagttttgggttatcagcgtggctaattttaccaattaattatgcattgaaatcgggacccaaaatacccttgcaagttggattcttgcaacgcaagcagagtatctggatagcattgtctgatctgtttagccataatacgcaattatttgatggcgctaatatatattgcggtatcctgatgttagttgctgtaatagctttttattttatacccaaaataaaaataagaataaaagtgatagtgagcgctttagagatttgtttcttaattagttatatttatgaatatccatatgtaatgtggcacggatttcaacaacccacagggtatggattcagatttagttttttaatcagtttaatgatgatattaatcactggttttgtgattaatatcggcttagaaaatgtactaaaaccattggtatatgcggtgctattatgcagcataatattgttaacgttgtataaaaagcaggtaatagataacgggatactaattatcaatagtgtaatgttagggttgcttactttaatgatattgattggctatattttctataaaaatataggaataaatataatcaagtggttaacgttagcccttattatgacagatagtattcaaaatatgcattttgttattagtcagttggatagcttacccggatacgtcgctaccgaaaaaaattggaaagaaaatgacagtcaaaatttaaagactgctttatcttatttaaagcaggaccgaacattctatcgaactgtagtaacgccaaatgcaatgctaaaccaaggaatgtacaataattttaacgggtttagttggtttaacacttttggatatcagcaattagctacaacgttatctcaatttggatatagtactactttggggaataaatcactggcatatcaagaaggaaatacgattgtggatagtttattagggctaaaatatagaatagcattgatgaatgattctatgacttctattggataccagaaggtgttcaatagtggaaactatgaagtgtatcagaataaaaatgctttaccgatcgcaattattaatgacaatctaaccattaatcaaccactcgaaggaaatgaactacagcggcagcttctcttttttaataaaaataaaagaagtgcaatcattcgaacaatagataatccaaattttactgttcataacgtaaaaataaagcaaaaaaataatggcattcagttgagcccatatggtaagaatgcttatattgagtatcggattgatatgccagctaattcagaacttctgactaagatagctgtaattgatggtgttaattcttatggtaaattagattttaaaactaaccagattatacgaaataattatcctaattttcataatgaaggtgtattgagtctttataagagttccaatcacaaaagtaatgcatttgttaaaatgcgcttaaaaggaaatgtaaatatcgcagaatctcctaaatttatactacttaatggagatgccctaacggagaatattgaaaagttacgaaaagaagctccaaaggttataaaaaagagtgagaatagtattgaattacaagtgaatgctaaacataaagagcctgtctttttttcgattccgtttgataaaagttggaaagcaactgtgaacgggaaatccgtgttacttgaggataatcatggatttatgcaagtaccagttgaatcaggaaagagcagtataaaactaagatatattccaaaaggtattaaagaaggtttcttaataacaagcgtgacagctttaatgttgatcctttttggaattaaacagcaactagaaaaaagagttagtagggaataggtaatgaacacagagagcagaataagattaaaatggattgatcgaaaaagactaagagagattatggctcttttaggaattagtatattggtagtacttcctttttttcttactagaggagtagttagaggtagtgagggtgaggattggacgtttcattttgctagaataagaagtttactgggatcattaaaggcgtatcagctgcctgtagaagttaattttttagaattttcggcacagggattgggagtcaattcaatgtatcctttcttttccttgtatctttttatttggccgctattattaccgataaaacttagattaaaagtatttatattcgctttgttatttaacatttgtgcttctgcaaatatttttggatttatcggggaattcaccaataacttgtggatcaagtcttcaattgcagttttatatttatttaataattatcacctagtactttcatataagagatttgctttaggagaactacttggctatacaatgtttccattggtggcgtggggaattgttaagatatggaaacgtcaaaaagttggaatacttttgcttgcgttaggtgtttcgctaattgctaattcacatattctatccttgttgtttttgattgtagtattaatattggctgaaatagttagattattaatgcagaagtttaattgggaagaagctcggtatatttgtattgcagcggctttgacaatcccgatgtctgcagttactatttataattttttagtgttaagtatgcataatcgatacttagcacctaatatttcggcacctctaaatgaatcttctatctttccgcaaacatatattgtggacttaaagcatacacttcatccattagcgcttacggatttaaatgcaagaacatggaatatagggaccctttttctaatattggcctttattgcaattatttatctaattgtaagaagaaaagataacgacggttattatgcatttgtaggaattatcggactcttactagtgattggtggattcgattttgtgaattgggattttacagaacaccttaaaatatttgagcctattaaagtaattcaatttttgggtagattattaatgttagcggctatattcttagtggtaccggttatgcgtatgatgattaaagtcaaggcgttgtgggcgaaatggctaataggtgttccaataataatctttctaattaatggtatgatgacaatttatagaactcagaatttttatcaggagatagtgccgactaatattttagaaagtgggtataataatcagctgcatactattgattattttccggctttttctggaccaaaaagcggtgtggactatgcggttaaagctgcgtatagtgatattaaaggaccgattatgtttggaaattcagtgccatcctttaatagtgcaacatatcatatgaggatcaaacacgtagttatgaataaatatttagtgacgccagtagcggcctataatagatttaactatcgggtgacaattgatggacagacagtaaaatggattcataaccaaacatacggaacaatcgcaattagttctaacgaattagtaaataaaaaaaaggctaagctttgtgttgttgcaaaaccattgaaaaatgagtggttagtaatgatcattgcgggcatagcaaatatggctgttatgttgaggttgattttggattttaaacggaaataggtacaacactgactagtgtcatgcaataataataagatggatactatgagtttaggaatcatggtattgaggccaaaaaagttggaggatttcacatggagaaaataactaaaaaaaaggaaatatgggcgattattttaattgttattttattaatagcgctaaatttatcgattaatttaacaggaaatgggatcacacccaatggtggcgatgataaggcgtttgctcaatttgttctaggaaaacactatctacaatttttacatagtcgatatacgggatggtcttctcgactagtaattgaatcggtattatcaacattaacgcacttaccaattctgtggcgattattaaacacattggcaatgtttactgttatctatatcccgtatctattgcttcttaaaggaactgatgatgatgagaatgctagtcgtctattgattagttttgggatgttcttcttattacctttcaatatgttctacgagacagggtggatggcaaccacaaccaattacctatgggttttagctgccggtttattagcgatgctaccttccttagctcaatatttaggaatagacattaaacataaaaaaataatttcagttgttgctttcttagccttaatctatgctgttaatcaagaacaaatggtaattatcctattattgggtaattcattgttattgtacgtaacaagaggaaataaaaaggcactggggagattggcatttcaattcgtagttactgtattgtctttgattatgattgttttagcaccaggaaatagcgttagaaaagtcaaagaaattcattggttaccattatttccaactttgtcaccctttaaaaaaattgagttaggtatttctagtacattaggtcacttctttttttcatttgatgtgcttgcgacaatacttgtgattttactttttgcgttttatataaatcagaaggggagatataaaataccgcgtacagttttctatattccggtactgttcagcgtgattttttggtttaaagatactttgattggaaaaatttatccaggattaaagaaaatggggggtgctgttactatttatgggacagatatctctttggccaatttacaatctatcttgccagatttacttctgattgtagtaagctgcattgttttattggggatattttcttcgggaaactctaaacgaatgtggttagttatggtagctatgttactcggacttatttcgagaatcatgatggggttttcaccaacaatttgggcatcaggagaacgaacattcctatttttatatgaggcacttatttttggttgcttctatttatatgatcaaattgagaaaaagaaagaatatcaaattttaacgcacattttaattggaattggtggcctagctttctgtgttattttatatacagtttaatgagtttgtagacaataacaggttatccgtgagaaactgaagttaaaattggatacagatatataataggcactttcgataaatataaaatttaaatcggaagtgtttttaatttagctaataattgatacccctatgaaactaagctagaatgcattaggattttaaacttaggtatgagtggtggttaggctggaaaagcgacgtgctagtttatacttggcgcacgtagttacctaattttacttttatttatttgtttcaaaaaatggttgcagtttcgtttaaagaggctttccattgtaatctcaagctaataattgaagattttataaagtctagaaatctttaaagaattccttagatttacaggtaacgaatagtggttagacactgtttatgctacaataaaatagattattttaaattactaagaaacggagttaagttaaatggaaaatggtgtgggatttaaatctgtgggtgttgtttttaaaaaatattggtgggtcatttttgtaacaattatcattggtggcgctgttgggatcatgactgccaaatcaacaattagttacgaaacaacagctaaagtatatgttaacaaggggtatgtcgaagacaaaaaaggtaacggtatttttgataacgatgttgagcgtttttggcaatcaattaatagtttaagtaagacacaaagctttaaaaaggctatgactaaagaggttagagattattcaagcgataatttgttaattgatagtagcaacggatctaaagtcatagctgtgaaatatactggcgctacgcaagccaagagtattaaaggtgctaagtatgcgacagagcttttgaaaaaagaagtgatcaagtatgatgacgagaagagtaagttagttgtgattgaccaggcttcaaaagatacaactgcaacaataggctttagtaataagaaaacaaattctattatgggcatcatctatggtgcagtattgggcttcatcctcagtgctattcattttattgttatgcgtagaaagaattaggagggaacgatttggttaatccgttctttatgttcattctggctttttcagcagttattctaagtttcttttttggctggtccagtatttatccaagtttttcgagtgatgttattttcttttttattgtaatgttcttgttagccggcgtactaggatactttatctataaaagtaatgtgatatcttttaagaaaattaagagtacaacaaatgttgtttggttagtggttattgttttaataggcacattagctgaaggagcctacaatcatggttttccattacagtttatgctccaaggtaaggattccggttatacagaatttggaattccgacagttcacgtttttttactcactctgacagcttttttaacaacctacttgtggcatctaatcctctcttcaactgggaagttgagaaatcaatatatactactttgtgttctaagttgtattccgtatgttttagaagttaatcgcggaatgttcatgatggtgatgataaactgttttaccatttttattctagcaatctggaagaaaattaaagttagacatataattggtttagcgattttcggtatggtgggtctgtttttatttggtgttatgggaaatgcacgagtgaacacgtcatatcaaaatggtcgatcagcttttgattcagcgtcaattatgcaaatcggtggtgcaactgaaaaatttaaaagtagtaagattcctaaggagttcttttggggttatatttacgcttcatcacccgtggctaactttcaaaaaaatgtagattatagcaagactactgaaaaaataacagtttcaaaagtaaatagtatgttttttggtgagttactgcccaatttcattggtaagagagcacttgctaattcagattataaagaggtcaaaattcaacaaattacaccagaattgaatgtcgggacagcattaagtagtccttaccgtttattggggtggattggtgttactatgtacgtcattattatctttgcgggtgcatacgtgtatctgtacttcttatataagttgaattcaagatttttcattgtcgggttatccgtcttaaatacaatatttgcattaactatttattcaaatatgattcaagcaactggtttgagcttacaactagcatatccaattatatttgcactaatcgactcatacgcagattattctaataagagttacttgaaaatttaggaggattttgatggagacaattagtttcatcctaccaatctatggtactgaaaattcaattttagaggctgggttggaacgcttaaagttggcgaagacaacttcatttgaattcttactaataagtgatggcgctagagatgatttagtagcaatttgtagacgcttttcagaagaagacaagcgttttaagttgattgaacaagctaatcagggcgtatcggttgccagaaatacggggattaaagctgctaagggaacttggctgctttttgttgatccggatgacttattagcagagaaatttgaagaaatattgttagaaaaagcaagtactaacgcagatgttatcttttttggttttgatcgagtatatcaagacggtaaagttgaaaatagttttcctaaagataagctatttcccgctacaccggtatcaatggatgatttaattcgtgcaacgctttcggatggcgcttattataatggcatttatggatattttcttggaacaccatgggccaaaatgtttcgaaagtcttttttagaagctaatcaattattttacccagcaggaattattaagagagaagatgcgttatttagcattgaggttttcttgaagaaccctagaattaacattgttgattcgatactgtatcactatagaattgatcatgataattcaattagtaatagttaccgacaaggggttaaggaaagtttcattacagtttcgaatgatctgaacgatgatttagtagattggttacaacaatcagataacgcattatttttggattcttatatgttgagactctcgattgaactcttgtttgcagatttttgtaatctaagcaactctaagtcatatcaggaaagaaaaaatgagtttaagacttatctagaaacgcctgttgttagtaagcaaataaaaaatgcgagattagtcaatatgccaatgaaacagaaactattaggattactgattaagcagagaaatttctatttattaaattatttattgtttaaaagaaagcgtggataagaatttgaaagttgcagcagttattgtgacccataatcgtagggataaattagaaaaggcgattgatagtttattagagcagtccgcgccagttgaaaaaatagtggttgttgataatcaatcaactgatgatacgctagattttttgaaagcaaaagcgcgcgataacgcacaaattaaagtcattcattcagaagataatttgggtggcgcaggtggctttaatatggccttggcggcaactcttgagttgcctgaaattgattggattagtatcgctgacgatgatgcagtctatgatcaagattatatgaagaaaatggctgaacttagtgaaaaacatgccgatatcggttgttttacaggaactgttatcgaagatggtgaaattggaaccgaacatcgtgttaaaattgatgatttggaccggctacaattatctaaaattgacttaacgagctatgaaggtgattttccagttgatattgctacttttgtaggagtttttttgagaaaagatgtgctaaagaagattggcttaccggaaaagaatttctttatttggtatgatgacattgaatactcacttcgtattcgcaaggaaacagaaatgatcaataatatccaagctaagatttatcatctaacagataataatagtgtcggagcaagtggtgttaatcgtccaattggctggaaggactactatggttatcgtaatcgttggcaaactatgaagttacattgtgagaaccaacaaattctagctaagcaattacggtatgaacatttcagatatgcaatgggtgcctttttaaagaaaaaaggccaatattctagatttgctgccgtcaaactagttaatacagcctacaaggattttaaaaatgaaaaaatgggtaagaatgatgcattcttaccgttttaaatgaaagatttggtgagacagagtgactaatatttctgtttgcatggcaacttataatggtgtcaaaaccttacccaaacagataaaatcaattatcaagcaattaaccgcgcaagatgaaattgtgattatcgatgattgttcatcggatgatacaatggggttactgagggagttgttggtcaattttaacgggcaaacaattctgaaaagaaacgatcagaatatgggaccaattaaatcgtttgagaaagcactaggacttgcgacaggcaatcttgtttttctttctgaccaagacgatgaatggcatgatgataaagtggaaattattcaagatgcttatgtaaatgggcacgctgatttaattgtccatgatgcaactgttattggaaagaatggagaggttgttgatcagtcatggaatcactacaaccataaccaagttgaccaaagtgtatttagtaatttaattaaaaatggttatactggtgccatgatggctatttcgagacgattattagatgccgcgttgccttttccagaaaaaatcgaaatgcatgatcagtggctgtttcttgttgctaaaaagaatcattttaaaattacggcgacttctgctactttaatggactatgttcgacacggtggtaatgtcactggcatgagtaagagaaacaaaaaagaaatgttgattggtcgcttaagaatgctgaatacttatttaaagatgaaggagtcctcaaaatgaaaggtattattctagcaggcggttctgggacacgtttgtatcccatcacacgcgctttatcaaaacaattgattccaatctatgacaaaccaatgatttactatccaatgtcagtgctcatgttggccgggattcaagatattatgattatctcaaccccaactgatacaccacggtttaaagaattatttggcaacggcaatgacttagggttaaacatcgaatacgccgttcaagaacaacccaatggtttggcagaggctttcgtgattggggcggacttcatcggcgatgattcagtatgcttaatcttaggtgacaacatctattatggtggtggcctttcagaaatgctccaaagagcgaatcctcaaagccaacccgttcgactgcgcactcttgttttaaacgtgctgcttcgaactgccttttccggttaacctaaaaatacatactatggcttaaacccgccataatatgtatttttctgttaatcctcaaagccaacccgttcgactgcgcactctatagtatttccccgttgcttttaatgactttttggtaccagtagaaactgtcttttggatagcggtttagttctctttcttctgtttcgtcgcgatccacgtagacgaagccatagcgtttttgatagccgtttgtccaacttaataaatctgtgaagctccatgtcgtgtaaccgatgaccgaaacgccatcggtaatagcttcgtggatggcttgaacgtgcgcctttaaaaaggcaatccggtagtcgtcgtgcacttgcccgccttctttcaaggtgtcataagcccctaaaccgttctcagtaattaagaccggcagtccataacggctctcaatacgtctgagtgcgattcgaagtccttcggggtcaatattccaatcccagtcagtttgttgcatataggggttatcagcggtcttatagacgcctggcaacccacttgcttggctagtgccctttttaccggaagtattttgcttggtcaagccaacgccaccttctaatggattagtcgtaaccgtcatcgtctgatagtaattcaaccccataaaatcgggatgtgcgagtggatcggctaataaagcttggtccgcttcagtaatttcgggtgcaatcccgtttcgttcgagataagtcatcactaatttcggataacggccccaagcataaacgtccatccacaaatcagcgttaatttgttcggcattatcagccgcaatttgattttctgggtccgcattcagcgcataagttgggctgtaggcaaaactaggtccgatgcccccttgatagcctttttcatggaataatttaatcgcactagcattggcaaggtttgccatatgattagcttgataagttcgcttagcatcagtcactgctggcggatgctccgctgttaaatagccgtgagtgatgaagacattttgttcgttcaaggtaacccaatgttgcacacgatcgccgaagcgttcgaacaataagcctgcgtagttggtaaaatcttcaataatttgacgcgattcccaaccgccatattcggcttgcaacgcttgcggtaagtcccaatgataaatcgtcacgattggttcaatatcattggcaattaatgtattaattaaacgatcataaaaggctaagcccgcctcattcacagcgcctttaccatttggtaagacccgtggccatgaaatcgaaaaacgataggctttgagcccagcgcgtgccattagcgccacgtcttcttcgaaacggtgatagtgatccaccgctacatcaccattcgtggctttgaacgttttgcctggaatgcggacaaattcatcccacacagaccggcccttaccatcttcttggtaggccccttcaatttgataggctgcagaagctgaaccccacaaaaaatctttaggaaatggtgctaattgatggtattccattactggtcatcctactttctctcaaagtcattgcttattgttctgcttgatatgctttttcgatttgtttcaacattttcttaaagccgcgtttacgcatgaaacccatgacaaaggccatcaatatatcattggtttgttgtaatttgccatttactttggcattttcgcgatagataacttcaatagactgcggtccattcgcgaaaatatcgtaacttgattgatagctcccctgggtagaagtcgtttcgtagtgataactctgatctttaatcagttgcgtaatcttcagtgtcgcccgattcttgccaaattgcttgtcgtacgaataattaggcaactgcgcttcagttagtttatccccagtttgttgcttaatatcaaacaacactgattccagaatcttctgataaaaataactagctggtatttttaaatttaatttaatttccatcccgttcccactcttctcttcaatgtgccatttgttgcttttaactaaaaagggctcgaacaaaagtcattttgtcctagcccttttgttcattagccaaactttaatcgactggtacaccggccatcttcttgtaaacgtcaacgacttcgcctgctaaatcgcggaaagtaattgcgttcatcaagtgatcttgtgagtgaaccgtcaataatgtcacttgcatgtgatcgccacttgcttctttggttaacatatctgtttgtgaattatgggcttctgataaagcagcatccgcttctgcaagtttggcagctgctgtttcgaagtcacctttcttagcggccatgattgcttccattgagctactcttggcgttcccaccgttgataattaagcccatgattgcttctaagttctgttcttctgccatagtatggcacctcctatgatcatctcatcgtgaaccactttcgtaaccattcattaattggtctagatatttcttcgagaatgactaaccaatccattaaaaggctttcaaaaattagttcctgattgtgagagttcgccactatcgcattttacgaagcgaaagaaaacccttacttatattgtaatcgcttcctgagatttgtcaattaattactgataaccttttcacaaacggactagtccaaaaaaaagaaaccttaacaggttgttaaggtttctcgctcaatctagattagaccactagtcattatttttcttatggtagcccttattcttttgatttcgtttacggtttttcttatgttttggttttaatggtgcagctggctgttggcgaactggtactaatttggctttgcgcgcgcttgtcgtcggcgtagccttttgcacttgtccttctgttgcttcaccagtagttggtacagcagatgttgctttcgttgcagcaactggtgctactttaggcgtcactggtttttcggcttccaaatgatcaccaaccaaataacgggtcacaagatcatattcaggcgccaataacttacgcaaattccgcccatcgtgttgattgcccaacgtcaaaacagtccccgtgcgtcccatccgaccagtccgaccagcacgatgaatgtaagtgatttttgcgtttggtacatcaaaattaatcacataaggtaagtcggtgatatccaagccacggccagccacgtccgttgctagtaagagttgaatcttaccttcacggaaatctttgagcgctttttggcgttctgtttggcgaccttgccctgagagtgcggcatacgttactttttgatgttttaacgtttgtgcagcttgtaagagttgcgcggattggttaaaaatgaccaatcctctaaaattcttttgatgtgctaaatggcgtaagacgttcactttttgagcgttaccagttgggataaatgcatgcaacacttccccacccgtcttatcaatcccacgcacgtcgattgtttcgattggcacgccgaaccatgtttccaactctaataagatatcggttgatgtcgctgaaaagaagccaagttgcacatcggcaggtgattcttgcacgatatggcgggtttctgaaagcccgctatccgtcaataattcgtcagcttcgtccataataatcgcttggagtgtatggaatttcactttccgttgttcgctcaattctaataaccgaccagtcgttgccacgataatctctggtttggccttaagccgttcgatttggcgtttaacattcgccttccccgtaatcgcttggacattacagtcgattgccttggcataaggttgaatgacgtcccgtgtttggatcaccaattcctgtgaaggggccaaaattaagacttgtagcccttcgcccggcataattttttctaataacggcaatgaaaacgcgagggttttcccagaacccgtgggtgccagtcctagaattgattggtcttttttcagtggttgataaactgcctcttggatgggtgacatttctgtaaatccttgctcatcccatagtgcttgaaatagtggtgaaacgctcatgtattgcctccgtcatgttaatctgcatcaaatgttattccggccgactgtcttaattgatataaaacttggttgaccgattcacttagctgtaataattcatgataccgttttgtgtcacgattagcaatcatcgccgcgaaattttctgcctcagcaaccattggattagcaagtgattgttcccctagtgactcaatcttttgcccaccttcgctgtagcggtcaacactgccgattgtgccggcattatcgaggacaatcgtcgtttggccaccataaatttcagacgttagataggaatcaacggttttgccaaaaatcaacgtgacgttaaaggttggataacgcagtgttgcgacccctttaccatccactccagttggtaacaattcagcttgataatcgactgaatcgggcacaccaaaccagctgacggcatcatagacgacatacacgccgagatcttgtaaagctcctccagaaaaatgtggtgagaaaatattcggttcttcacccgctaaaacagcgtcatagcgtgatgaatatttcatatagctcaaggtcgcgccattgatcgccggtaatgcgttgatggcttgttgtacaatcttaaagttggcctcatgaatatgacgtgctgcttcgaataagaattggtctggatgttgctttaataatgtttgcatggctgccatttcagccggattactgaaggcaggtttttccacgatgacatttttacccgctaaaattgcttgcttcgcttgttcaaagtgcagactattaggtgatgcaatgtagacggtttcaaattcattggcattcataaacccgtctaagtcagtgtaacttgtggcttctggtgcgtgatacttcgttttaaattggtcggctttatctgccgtccgtgaataaacagctgttaacttaaatgattcagattcccgggccgcatcaacaaattgtcccgtaatccagttagtcccaataatcccaagtgtttgcattataatcagctcccttatttaatactgccagtatacgggatttagatctagaagcctatcgaaaagtttttctactgataagaattccgccactattcacttctttaaccattccttaaaaaaacagtcgtaagtccgataattaattgtccgcaaactaactatttcgtggtagaataatagtaagttggggtgtgacttatgcgattttttaaatttcaaaaaccacaagcaattttaaatcaaaccattcaccagtatcagcaaaaagttcggacgactcaagcgagtaaagtagcgactttttatgctggacactggtcttttaatgacaaccaaacccgaaaaaaacacacattagaaattactccgaacttgttggtgcaaatcgatcataagccattgagtggtcaagtcatttccctcacggaaaacgaattggtctttctcgatcactacggctatcaattaaaaattacttgtgaaaatcaacggcccgtttcaatttacgatgaagccgaagatatggattatccaatcgaatagctattaaaaaaggcccataatgctcagcgttatgggcctttttagttattctttatttgttcaacattttttgagctttatctgggacttcgtttttggcaaccttttcccatgaaaccacacccttatttttattgacgattaatttgaggtacgcatttcgtttaagcggcgttgatttattaccattaaaatcaacttttttggtaacaccatcttcattgtaggctgcttgttgatagttataatcgataaccgtttcccctgctgaatccttttcttccattcgtgttccgtttgaaacaatctgtgtatagtaggcttccccaccgtaataatagctatgaattccccaactaccaccgatgaaaaccaccacgattgcgattaataataaccagcctttgtgtttaatcattattttctctccgtttctatttaatagtctgccattgttgcttggtgccagtaaaaactgctaactgatagttcgtctgattatcactgtttggaatctgactagccattgtgtattgccagaacccgttcttagtcgccaatgttggctgttcccgcgtagtttgccacaatggatagtctcctttgtgtggcacataccgttttaataagctgggtgcaccaccaatgagacaattttgatgataatgttgattaatcaaggtcactagctgcgccagtgccatttgcgttttcttttgtgcgggcggttgttgtgcatagtcgttataataatccaaatagatcataattggtaaatcacccgtctggctgccaactgctttaaaaagttggtcagcttggcgttcaggcgaactatcaaaactaaaaaaatgaaagatgcccacgcgtaagccagtgccacttgctcgactgtaattggtgtcgaaattatcatccttgtaactggccccttcagttgcttttaaataaacaaactgaataccgtccttttttaacccgtcaaaatcttggtaaccatctgactgacttaattgcatccctagaatcggatattgcgtcgcgcttggtcgatccgaacggtgtttcaaccaccagatagcaccaccaagacacagagctaccgcgataatgccgataattatttgtcgccaatagcgcttttggaaactgtcttgaaaaatcggtgtcacttttcgtctcatccacggttcctccatttccagccttagtacgcttagtttactatcttcatgcattcgagacaagccacctaacaattttgttcgttactgtcacttagagttgccttttattggtaatcagatacaatgtgaacaaagggaggcggaatatgttagatgaacgcttagtggggttaacgtttactttacaggatgctaaatcaaccggcaccgttaatttttttggcatcttatatcattaccgtgtcgaaggaccagctagcgctggcttactcgtcatggtaacggccgtcacacctttagctttaatcgtgacagcgcaccacaatattctgacgtattaagccagacaaaagggagtttttattatgggtattttcatcagtattttagtcattcttgttttagtgattgttgcagtcaccctcttttcatcatttgctttgattcataccggggaagttgggattttggaacgcttaggggtctacgttaaaacgcttgatcctggtttccatttggtcattccattcatttatcacatcacagaaatcgttaatatgaaacaaatccccttaaaagtcgctgaacaagaagtcattaccaaagacaacgtggttgttatgatttcggaaacgattaaatatcacatcactgacgtcaatgcgtacgtttataaaaataaagattccgttctaagtatggtccaagacacccgtgcacaattacgtgggattattgggaacatggacttgaacgatgttttaaatggcaccgaaaaaattaaccaaaccctttttgaacaacttagcgaagtaacagccggctacggcttaaacgttgatcgggtcaatatcgattcaattcaagtggcccacgacatccaagaatcaatgaataaattgctccgtgcttcgcgtgaaaaagaagccaacattatggaagccgaagggctcaaagccgccgcaattcgtaaagctgaagggttaaaagaagcgaatattctagaagccgaagccaataaacaaacacaaattttggaagctgaagggaaagctcaaagtgaacgaacaattgccgaagctgttaaagatcaaattaatttgatcaatgccagcttagtcaataacggcgaactctatcttcaatataagaatattgaagcgatggaacacatcgcagacggtcaaaataacaccattgtcttgccaaataagtcaatcgatagcttgggtaatttgccagcaattggtgctctagttcaaaaagaaagtaccaagcattctaattaatgaatgccaataaaaaaggccccagaataacaaccttactgttattctggggctttttttattggtcctctgaaggtgttgaatccttaggtgttggttgtgtattgcgggtgttctttttgctgagaatgtattgttctaacaaggccacaatctgttgattctgtggtagatcagagtgttgtgcttggtcacctgtcaccgtaatttcggtgtagtgcttgacttgcccttgataaatgtacttccccgcctctacactacgcgcgggtacaatcccatcattttcaaagttttccgttcccgcaattgaatacatcgataagttcgtcggaatatttttacgtttcttaatgaaatccgtcagcatctgtgacttatgcgtaatcgatgtttcggaaaagttatacggcgaaccaatcgtcatcaacttcttcactgtaatatcatcgcgattaaaataatcttccaaaaaagctgtataaattaagccgccattagaatggccaaccgctttaaagttattaaattgatacttcttagtcaacgcggtaaatgcgagcgaaaaccatttagcttgcttttgaatattactataaccgtccttattgttttcaaaaccaaccacgataaacggttcattatcccgcggtttaatttcccctgaatagctaatctgattattttcatgcacagttagttttaacaagctgtgccgattcccgcggttagcgttcaatttagccactaattcatcaaaccgattttgggttgcactactccctggaataaaaattaccggtgacattcgtgaatcatggcgcttagctaaggtcatcacgctctggcgactccattgagcagctggccacattaatccgccgatcaaggccaaactaatgactaacaaccagaggcttttttttcttaatttggccaatttatgccgcctcctttacgagtgctaattgatctgccaattggacaaacggcttgtagatcatcacgccgacgacaacgtttaataccgtcaccgccagcgcgactaaatcaccgttggtgcccatgaacgcttgcaataagccgggggtcccaagtggaaccgtgaagactaccgacggcatgagattcaatgcaactgctgccgatgcaatccccatatttaccagtggtaccaataagaatggaatcacatacaagccatttccaatgacaggcattcccacaaggaccgcgctattaaagttaaataaaacgggcaacagcgaccatcgaccaatcaaatgataatccctttgtttgctgaagatgaaaacggcaatcactaaggctaatgtcccacccgtcccgccaatcgcaccaaagggttcatacaaagtccctaacgtgaacggatatggaacgtgccaagccgtgtgatgactaaacgcatagtttaagttggccgaagatgcgattccctcacgcccaaattgggccaatgttggcatactcgttaatccaaaaaaagttaagctagtggccgctaaaccagtccccaacgtgaaaagcagacccgtttgatttgcttttagtgattgtaatcgtaagatgacttgatctggcaagattgaaatcgccaaccaatttagcaggatactcagccctaaaatgacgccgagcaccaataaaatcgcccacatagaatccaatgaacgtcctactgctgacccattcagcggtaaatcacgccgatgaggtcgtcctaattttttgaaggctaatccagtcagatagccgactaataggccaaaaaataagccccccattcccaacatctggctattgaaagataagccctcatttggcgtcaaccgtaacgctaagattaaataggcaatgagccccgtaatgctggctaattgttcatcacgcttatagtgtttggctgtatagcgcgccgcacacatcgctgctaatgccgcaacgattcctaacgtcaaactcgtaatgctgtcaaacatcatctgaaagatattccgtttactcaaccaattcgaaagatgaaatacattcacaacaaaactattccggttaaaaagtgctagctggatgagttggctgatactcccaatcaagacaaatggaaataacaacgttaaacttcgctgcataatctgatagaccgccgcggattggaatcggttaaaatgttgcgctaagcgcatcattatagattgttttttgacattcatgcgttaaccctctaaacatgttttgataatttcattctagccgaccttccgcttaaatgcacgtctgaacgcaaaaaacgggtcgctactttccatctctggataataacgacccgctaaaacgtgcgccataagccatcttcttccggttagctacatcagtcaaatcaccaactttgttggtaattcgcctgattgggtgataggacatccagtctttttgggccaaaggccttataacgttgaacccacgagacaactagtgagttattcttaataccatattttctcgctattaatttataacctaagggtgacgttagataatcctgaacaacttttatttttaatgttttagaatatttggtccaatatcgggggttcacttcataaggtgatttttttaattaagtgcaaccaagctgataatcaaaatatgaaatggatgacaacagcttttttaggctaaaagtcgtataatgacagtattctaaatgaaattggagatcataatatggcagaattgatgcgtttttatcaaagctttcaaccggaacattatcaagtttttctagatattaatcgggctcaaaaacaatttagtggtcggacgacaattacggggactgctaaagaagcacttgttttaattcatcagaacggtttagtgattgaaacagtgacggctgcaggtaagagtgtgccgtttacagttgataatgacgcaaatgccttgaaagtcgaagtcggccaacctggcgaagtgactttggtaattgcctatactgccgctttaacggattcaatgatgggcatctatccttcttattatcaagtcgatggggtgcaaaaagaattaatcggcacgcaatttgaaaccaattttgcgcggcaagctttcccatgtattgatgaaccagaagccaaagcgacttttgatttagcgattaaattcgatgagcacgaaggcgaaacgattctgagcaacatgcctgaaaaagaagtcatcgatggcgttcaccactttgaaacaacggtccggatgtcaacgtaccttgtggcctttgcttttggtgaattgcaaggggttcaaaccaaaacggagagcggcgtgcaagttggcgtctttgctactaaggcacatcaagcaaacgagctcgattttgcattggacattgctaaacggtcaatcgaattctttgaagacttctaccaaacaccctatccattaccccattcatggcagttggcattgccagacttttcggccggcgcgatggaaaactggggcttagtcacttatcgggaagcttatttattactcgatcctgataatactgccttggatacgaaacaccgcgttgcgactgtgattgcgcatgaattagcacaccaatggtttggtgatttagtaacgatgcaatggtgggacgatctttggttgaacgaaagttttgccaatatgatggaatacgtcgcaatcgatgcgttgcagccggactggcatatttgggaaagtttccaaacctcggaagcagcggcagccttacaacgtgacgcgactgatggggtccaatcggtgcatgtgcaagtcaataatccagccgaaatcgatgcgttatttgatggcgcaatcgtgtatgccaaaggcgcccggatgctcgtgatggttcgcgctttaatcggtgacgatgctctacgcgctggtttgaaagcttattttgcagcacatcaattcggaaatgcgactggcgctgacttgtgggcagcactggggaaagccgctaacttagatgttggggccattatgcattcatggctcgaacaaccaggttatccagtggtaacggccaaagtcgttgacggacaattaacgcttaaccaacaacaattctttatcggtgagggtcaagaagttgggcgtcaatggcagattccattgaagagcaactatgcggcagccccattattgatgactgaccgtgaattggtactcggtgattatgctcaattacgcgccgacaatgggcaaccattccgcttaaacgtggggaacgaatcgcatttcattgttcattacgatcaaacattattagatgatattttaaatagtagtgctgacatggcaccaattggacaactgcaactactgcaagacttacgcttattagctgaaggacgtcaaatttcgtacgcagatgttgtgcctgttttagcaccttttgccaagagtgattcaaatgtcgtggcagatgccctttacacggttgctggtaacttgaagaaatttgtgacacctggtgaagaaagtgaacaacacctacgtcgattcttcgaccaattgagtaaagcgcaagttgcacgcttaggttggctggttcaaccgactgatagcaatgacgatcagttaatgcgcccaactgttttaagcgcagccttgtatgctaaaaaccaagcagccattgatgtagcccatactttattccaagcgaaccaagaaaaactggtcaccttaccagccgcaattcgggtactggtcttgatgaatgaggtccaaaacttcgggaatgccgcactttatgatcagctcttagcagcttatcgccaaacgagtgatgcgagctataagaatgatttgactgcggccttaacgcgcacgactgatcctgaattaattgcgaccttaattggaaaatttgaagatgccagcaccatcaaaccacaagatttgcgggcttggttccgcggattactcgccaacgacaagagccaacaagcaacctgggattggattcgcaacgattggcaatggctagaagagacagtcggcggtgatatggaatttacaacgtatatcacctcgattgccgcaatctttaagaccccagaacggttggcagagttcaaagccttctttgaacctaaactcaacaccccaggcttaacccgggaaattacgatggacattaaagtcatcgaaagtcgggttgcattgattgaagatcaaaaagcagcggttaatgaaacaattgccaaacatatgtagtcgaacgttgtgcaagttaaattcaatttgaggggttttgagatgacgattaaattagtcgcgattgatattgatgatacattattgagttcacagcaccaactgctagccagtacgaaacaacaagttgctaaggccctggaacagggtgtgaaagtcgttttgtgttccggacgcccattagctggcgtggtgccctttttaaatcaactagggattgccggtgataatcaatacgtgattacgtttaatggcagtattatcgaaacggcgtctggtaaaatcttgaaagaagctggcatcagccgagaaacctaccaagcgattgatgactactcgcaagcaacgggcttaccgtataatgtgctcgatcaaaatagtgtgatttatacgagtaatgtgaatgttgcaccaatgacggtggtgcaagcttgggaaaacgaagctggtattcatattcgcaaaccgaatgaaatcgacgcggccacgcagatggtcaaagcggtctttacagggaccagcgaacagttagatgtacatgaaccacaggtacacgcgcaatttggaactgataattatgttgttcgtgcggctgacctctttttagaagtgatgcacgctgatgttaataaaggcaaagcagtgcaatacctcgcgaataaacttggattcgcgccggatgaaatcatggcgattggcgatgagaaaaatgacatcccaatgttccaatttgccggtactgcggtggcaatgggcaacggttcagctgaagcaaaggcgcacgttgactttattactgctgataacgattcggacgggatcgcccaagcatttgatcaatttatttttaaagtataatcaaaaagcccctgacttttgtcaggggctttttcttcgatatgtacaagctttccaacacgaatatgattttgttcaacaaaggattaatgctggctatatcaatcaatcgattgcaggcgttttgtataccgaaattaatcaagcacagttattgcaactccaacaattccaaggaacggaaactcgagttgcaaaagctaaagcccttctattggggttcgttattaattgatggctttattttagtgattttaatgggtcgcttttatcaattaccattcctgaaaactgatccgtttttagtaatggtgattttgctaatcgaagtagctaatctctacatgatgttgacggttcgtaaccgtcaacaacagttaggaattcaaggtatatcacagaagtcgattatgatgtatgtattcggtggattaattgttctgttaattgttggattggcactactctcaagtcaatggggcgcaattggcgttattagtgggggcgttgttggtgggattgtcatgcgggttcgacaacgccgctcgaagaatagctaaataagtgcctcaaatacattagttgtgcctgcgttttggagtctgttagtgacattaataggggtaattagcttggtcaaacgaaataaaaaagcttaattaaagaaaaaagcgcggtagatttgtaaaaatctaccgcgcttttttggattaagcaaacattttcttagttgcgcgcatcaatgtcttgatgtcacgatcataacgtggtgtatcgactaacttggccattggaatgccagcgaagtgataagctgcaatttcgccagaacgaacagcactttgttcagtgaaaatcatctgataaggttgttcaacgaattcaccagtgaaggctaagttggttgaatgttcggggatgacttctggacggtcagttttggcacgattattaaagagtgctgaagcatatggcatatagacaggaatgttattgatgacactgtccataatttcagcttctttttcacgaatattgattgggccaggatcaacttttgatagttggccaattaattcttgaagcatttccttacccgtcatttcgatgtaaggtttatccacaaattcaccgttacgacgtgggtagaggaagtaaccccagataaccgcttcgtttggtttttgcgttgtgaagtgtggttgatggtgaacaacaatcgacatattcacatctttttgaccaagtggtgtgattggtttcgttgataggaacgaattcaaagcattcccaggaatttgcgttgtaatccgttcgatttcgtttaacaaaatatgattcttagtcgttaaagtgaagctgacccactcactggcattgcggtcagcgaagaatttatcgggattgccaagattatagaatttagaagcgacttgtttccacagaccggcagcagcaccataatccatgttttcagctgctggtgtattataatcgccaagtgttgcggaatcggtaattgacccgtttgtgaagatgaccgctgtgtcgtcgtccaccgtaacgtgttcaacttcatctgtctcagtattagtcattgtcataccagtaaccgtaatttcatcggtcatctgagtctctttaaagtctaagtcagtaatccgtcgattgaggataatgtgacaaccttgcgcttttaagtagttaatcagcggcagcatgatactttcgtactgattgtaacgtgtccggttaacaccgactaagtgttcaatctgagtgaattcataaatcatttggtgcatgtaacggcgtaattcttgtgcggaactttgggttctgaaagcaaaggtggtttcccacatgtaccagaagtttgtttggaacatatgtggatcgtccttgaagtattcggcaattgaaacgttgtctaatttttcttcttcagaatcgggcatcataatcaatttggtcattaataaccgatccttattattaaagccgagatgaccagcatccaaaatacctttactaccttctaataaacgtgctttgtcgaatgtgcggtgttgagcatcgaatgaacgggtatcttcttcagccgtcatattgggttcagttgctgaaggaatccgacctagaagatccattaaatcgacataagtccgatagttaagcatccgcccaccacgtgcaacgtagcccttagtattttcgagaggatggtttttattccaatattcatcggttgtttcggaaactgatgccccatcgtttgaaccatggtcatctaatgaatagaatgtaatcgcatcgccagaccaaccgccttcttgaattaaatagactgctgcggccatgttagaaaggccagcgccaatcataattgcttttttcttaatcatatgaaaaacctcctagattcagtttagaaatgacgagtgactaacggctttcgaatttttcgtaatccacagaatcgtctctaaaaagttccattttcttagctaataaacaagcaccggttgctgtaacacctacaaaaataaggctgcctaatagaaattttttcatgtttctcgctcccttccattaactacttttgatatctatattataccgcgaattcctaaaataggaagataaaacccttacataggaattgtcagtggtcatgatacgattattgatgggattaggccgctaaaaatcagaatagttaagtttagtttaaggctcttattagtcaggcataattcctagggaagcactaacggatttaaaaaaagtgataggcccccaaatgatggttgacctcaagtcagcttgaggttgtaaagtagtcttattgattagaaaaaggagacttttaaatgcaaaaattatctgccttaacagccccaatgaccttaagcaacggtgttaccattccaggattagggtatgggacatatcaaacaccaaatgaagaaacaaaaaaagcggtcttagaagctttatcagttggctatcggcacattgatacagctaccgtttacggcaacgaacaaggtgttggtgccgctttgaaagaaagtgatatcgcgcgtgaagacatctttgtgacaagtaagctatggaatacagaacggggctaggatgctacgaaagctgcctttacacaaacaattgcaacgttaggtgttgactatttagatttatatttaattcattggccagctaacactaaacaatttgaagccaaagatgctgaattaaatgctgaaacttggcgtgcaatggaagatctatataacgaagggaagatccgtgcaattggtgtgtcgaactttatgccccatcatttagatgcactcatgaaaaccgccgttatcaaaccaatggttgatcaaatcgaagtccatccgggctggccacaagcagaagctgtgcgttataatcaagcgcatgacatcttagtcgaagcttgggcaccacttggtgaagccagtgcgctttcgaatgaaacgattgcaacaattgcgacgaagcacggcaaaacggcagcgcaagtttgccttcgttgggggattcaacaaggtgtgttaccattacctaaatcaactcatcaagaacgaatggcgcaaaataccgatatcttcgattttgaattaacagatagtgaaatgacccaaattagtgctttggaaaacttaggcggtcaatgcatggtgccagatgacgttgatttttaagcaagtataaggaaggttaatatggcattatcaattggcgtagtcgcccaacaatatgatttgagtattccgacactacggtattatgaagaacaaggattattaccgtttattaaacgcagtccggctggtcggcgtgaattccggcaagctgatttagactgtttatgtgatattgaatgtttgaaaaaaaagggtatgcagttaaaagatattaagcaatacatcgattggcgaactgcaggtgatgaaactttggaccaacgcttggcgttgattcaacaacggcggcaaatgttggctaacgagattgaatcactgcaagcagaattgacgaagctagatcataaagaatggtattacacaaaggcacttgaagccggaacagaatccatttttacagctgactgtgatacagaatatgaacgtgcgcatcaataatcgaaaaaagaggcaacctgataggttgcctctttttgtgtgtttaaacggttaatgttttttgcataatcagatcacgttgtgcgtcgcttccaagttggaagatgtgatcaccaacttggctgaagccgaggtttttgtaaaagttaagtgcagcagtgttgtgttcccacacgccgagccatacgttagttttatggaattgttgcgccacggctagtgcatggttaattagttgtgttcccaaaccaagtcgcttaaaggactgtcgaatatagatacgttcaatctccagtgaatgcggggcagctttttcagtttgtgcgccatcaatgttgagctttaaataaccagcgacttcgccatcttgataaataaaatagaagaacgaatcgggattctcgagctcgctagttaatcggtctgtattataagcttcttctaagtagttagcgagatcttctgctgcattttcagcgccaaaagttgctgtgaaagtttcacggctgatggattgtaagtcaggtagttggtttaatgtgacagcttgaattggcattgtgatgcctcctttgttgtaatagtgtcggacgtgtccctttttgacaaaatcccagtttgcggcaacgttggcactaactttgtttaggagtgcttcaagattatgggcctcgtcggtcgtcagtccagtcagtgccatttgatttgaataatcgttttcagctttgatggcgggatagacggctcgaccggcctcggtgagatagagatgtttgatcttacgattggttttgtcagggtatcgttcaactaaaccatgcttaattaattgttgaacggcgcgcgtgactgttgcgcggtcgacttttaataattcacctagacgttcttgaatgatcccaggctgttctgcaatgcggactaagtaaaggtattgcccgcgggttaaatcatattgttggaattcaatattagcaatggattccaacgcgcgggctataaccccgattgggcggagaatttcagtcatgatggcatacctcatttcgataaaaatagtataaaatatttttgttgcatttacaacaaaaaataaagcttcgattcgttaagtacgccaaaaataagaatataattaattctcgaaggaaataataagaaagggttctctgaaatcggcttctaaagtcgtaaaaggcgcttacaaagcctatattttatgatttgttaagtaagcataatgtttatgtaatgttaatgtaacattcgccctatatacttagtctcagagttcgggcttaactaataggagaaaataaaccatgtcatttaaaaaaacgattacgactacaattgctcttggattattaacagcttcagttctttcaacaaacgtagtatctgctgcaacttcaagtgaagcacaagaagcgattactgctaataagaacgcaacaaacgatttgctcaaacaaatcgaatcagctaatacagaagtgattgggttggatcaaaagatttcaacaaacgcttcaaaaattgctgatcaagaagcagcaattactaaagcaaataatcaaatcgaatctctttcaggtcaaattacggatgctcaaaaagaagtttctaaacgaacagtcgtattgaagaaacaattagtgaccttacaagaaaagagtggggatgctgtcagcgggaacgtatatgttgacttccttttaaactcaaatgacctttcagatttagtttcgcgttcattcacaattaataaattaaaccaagcaagtaaagaagctttagatgatgttaacagcgctaaggtaaaattaagcggcttgaagacagaacaagaaaatactaaagcaagtttagttgctactaagactgatttagaaaaacaaaaagcaaacttagaatcattgaagagtgaagctgatcaaaaacaaacagctttatcacaaaaaatcaatgataacaaagacgaattaacagctttacaagcagatttcgacaaagcaagtactgaagaagcagacgctgctgctaaaaaggctgcagacgatgccaacaatgccaacaatgctaaaaaagacacacctcaacctacatcaattgacacgccatcagataataagggtggcacatctgttttcggtggcagcggaaaagttgctggtaattcagctgggaattcatatgcatggggtcaatgtacatggtatgttaagtcagtagcaccttgggctggcaataactgggggaatggcgctcaatggggtgcttcagccgcagcagctggcttcacagttaaccatataccagcagcaggcgcaatcgttagctttgctggtggccaaatggtaggttcttgggccgcagatgggacatatggtcacgttgcttacgttcaatcatacgatgccgcagctgggacaattatcatcactcaaggtgggatgggcttcagcaaccctgctggtcctaacacccaaacaatttcaaatgccggggcatttacttatatccataactagacattaatgattgaaggcccgcatcctagatgcgggcctttttttatgaaataaaatcaattttataaaatataatgcctgtggagcagagcaggattactagttcgcatattgtaggtcctcaaaatagatagaaggagtaatgcttattatgaataatcaattattaatgctcattaaatatcgtaatattttggatcaattatttgtcacagttttgcaaaatgttgacttatcactcgaacaatatttgttgatggaaaaaatggatcgtgaaaaagaagaaacgcccggcaaccttgctgcttgtatgggcgtttctcgaccagctatttcccgccaatgccaatcgttgggtgaaaaaggattaattgaacgggctaatgtggggagttttattggtgatagtcgtaaagtatactatcgacttacaaccaaggggaaacagttattattaaagattagactaaacagtaatgacatgattgatagtttggattctggatttgttactaccaattgggatgaaattgataaccaaattgcgctaatgtccgacgcggttaaaagaacattcaatatcaatgagattcaaatcttttagagagactatcggaatctgaacgggggagttatttagtttagcgcgtgttaatgggcaggatcgaagcgatggatgtcgagtatgattatttttgaatgtaaccggttgcgatgaattggcataaacggtatattattaaggtatctaagggataggagagaactaagcatgacaattaaattaatcgcatccgatatggatcataccttattaactgagagtggccagttgccaccaaactttataccaaccattcagcaattacatgctaaaggggttcaattcgcagctgccagcggtcgaccaatgtacacgttaaagcaaatgtttcccgaacttgctgacacaatggtttacgtcagcgataacgggggtgcaattggttatcaaggtgaaactttattcaaaagtttattgccgttagctgattaccaacggatggtccaattcgttaatcaaacgccagatgggattggcgtgatttgtgggatggacgcggcgtacgttgaaacacaatatcgagattatgacgcgactttgcggcaattctatgccaacattgaatatgtacctgatttaacgcaggttagtgttgaagccaacaagtttacgatttatttcccggaaaaagatagtcaagcacagtatgaagctgttttcgcacccgaatttgaaccggcttattcagtaacggttgctggtgttgaatggatcgatattatgaatcaaggcatcgacaaaggccatgcaatgcgctttttggcggattatttcaacatcacgccggcgcaaatgatggccttcggggatacttataatgataaagaaatgctgcaaaccgttgaacatagttatttgatggggaatgctgccgacgatatgatccaatatgcgacttatcgtgccgacactaatgagaactatggtgtgttaaaggagatccagaaattactttagtcaaccaatcgtagatgaattggtaatgctgggtagcatctgtttctaataaaatttcatgcgctgtatgaggtagaatgcgcaccgttgcgttgttaacggtgcgctttttgaattggttcgttaaatgccgcgcgcggcgaccataaccgccagctggatcgtcggcgccactcattacgagaactgggcgggattgtaaggcaagttgccaatcagcatgccgagttaactcagtgagggtgaagagcattgcaaaaccgctatttgaaaagacgtagccacacaatggatgctgttcgtaggccgccacgtttgcttgattgtaacttaaccatgaaaaaggtcggtgagcatcaaatcgtttaggatagaccccaaacgccaagttattccagacagtaccggggcgcttagctgcaatggcgccgattaatttaacgattggtaaggcggatttaagaatgaagggtacatcgataacgcccatgaagatggctcaagtaatcggcacttcagtttgcttaacatattgtgtcgctagcattgagcccattgagtgtccgagcacaaataatggtagctctgggtattcctcgtggacaatgcgaccgattaaggtacaatcgttgactagcgtctggagcccgtttggcccgaaataaccgagctcatcgttggactgaacggagtggccttgcccaatatgatcgtgtccgatgacgataatcccacgatctgctaagaattgagcgaaagcatcataacgttcgatatattcggccatcccagttagaatttggacaactgcgaccggtttttggattggaaaccaagtcacgacatttaaagtatggattcgatcagtagattgaacggtcaatttttgcattggttagcgcctcccgaaaaagataacgtactttacgattcattttagcagaaacaatctagagataccaaaaggacgccaaacaactttaaccgttgtttggcgtcctttttagtcatgcttaaagttgcacatcatcgttaattcgtgttgcgcgtgagaagtatttcgaatagaagcgactgataattccccaatagtaaaagatgagggctaatgcgctaattaagacgaaatcgagtgggtaaggaatcaggttaattccgttgaattcccgactgcccaagaatgaaatcagcgaaagcaatgcgagatagataattaaccataagcttcctttgaattgggcccaagtattttcccagtgaatccgatactcatagtagaaataaaatggtaagccaagcataatgacgccaatcaccttaatggttgttggccacattgcccagtaagttgctaaactggcaaggataaaggataatggcgacatgattttcatccaaggtgactgaacagggcggttcatatcaggggccattttacgtaatgacatgacggtgaccgggccggttaaataggcaatcaacgttgcggttgaaatcacgctggctaacgttccccaacttctaaaaattgaaacgagtagcatgctgacgatggcgttaatgaccatcgcaatgcgaggaatattatattgttcgttcatgcggccgacaatcggtggcatgtgtttgttctgctttaatgctgctaatgtccgtgcacatgaagcgacaaaggaaacgccggttccaaagggtgaaacaaacgcatctaagtaaagtaagacggctaaccaatggattccaagtaaaatggctaagtcggcaaagggtgattggaagtttaaaccgtgccaaccgactttggcgagcaaggcgggtgaaacagaaccgataaaggtaatttgcaagagtagataaatcacaatactgatcccaagtgaaattgcaattccacgtccaatattccgtttagaatcacggatttcactgccgacattgattactgtttgaaaggcattgtatgaaaagataatcccagaaatcgaagtggctgcaaaaattttggcggaaccatagggcataaacgtcgccattgaatgcccgaagttgccagtatggaaaccagttgagactaacataataatggttaataatggcacacctaatttaaagattgcaatgaagctggtaaaacgggtcaagaatttaacggaccagaaatttaaaagggtgaagacgatgataaaggcaaagacgacgagcaagccacgattcgaaatttcagcgtggtgcataaagtgattcgtccagttagcccacgcccatggccaagaactcatatactggacagcagcgacggcttcgattgggataatcgtgactaatgatacccaattggcccacgctgcgatgaagccgagtaatgaaccgtgactatattgggcatagtgactcatcccgccactttcaggaaacatcgtcccgagttcaacgtaattaaaggcaattgcaccaatcacaattgcgccaacaatccaagagatgatggctgctgggcctgccacggtcgttgcctcccatgcaccaaacagccaaccggaaccgatgatggaacttaaaccgagcatcactaggctaaataaactcattttgttcttctctatcataaagacctcctgtgtatggtgtgccattatagcaaccatcaccgttggtttcaaattaaaaatacggctaaaatgagtcgtgaagtctatcaaattaacaatggtaacgccttctgaattaattattaacaattaaaaaaaccgtcacaaaaagtgacggttgaatagttaatttaagtcaattgccccgttgaatggcatccgtttgtttaaaaagatttaatttacgatcgttccagaatgtttcagacatatcgcgatagaagatcgcagtctgacagcctgggcaacgtttgataccatattcaattggcgcctgacatgcagggcaatgaaatgcggttgattcaggaattgtattttgcgaatcggccattaaaaggactccaatcaagttgttatcaatagtataccgcatacatacgctatttgttaagcgtttaaacctttttttttcaaaaaatatgcacaaatcggaaataatatgctatactatatcaagtaatgcgagtgtagtttagtggtaaaactcaagcttcccaagcttgcgtcgcgggtccgattcccgtcactcgcttaaagattcatgcaaaagaggttgcaacagaagaaattttgttgcaacctcttttttattctctgaaatttaatcctcggcggatacccgacttacatcacactcttttcgttatcagacctaaggccgattgtttgtttaaaggcgctctgataaagtatatttattatctatcgactaaaaactcgtgacacttacgagcaatctaagtagtgggagcgtacgacattgacattattagagattaaagatattcacaagtcctattatatgaacaaggctgaatttaaagtcttaaaaggcatcaatttaagctttgaccgtggcgaatttgtttcaatcctcggggaatcaggcggcggtaaatcgacgttgctgaacatcatcggtgggttagatcaccaatacgatggggagctcatcgttgatgggacatctttaaagaatgcatccgaaaagaaatttgatgcttatcggagtcaaacgattggctttattttccagagctttaatttaattagtcatttgactaacttggaaaatgtgatggtgccacttgaaatgactgatctatcacataaggaacgggttgccaaagcgaccgccttattggaacaagttggcttgaaggaacatatccataaacatcccaaccaattgtcaggtggacaaaagcaacgggttgctattgccagagccttggctgctgatccagatgtcatcattgccgatgaaccaacgggtgcgttagatagccagaatacggccgagattctcgaaatcttacaaaagattgccgaagatggcaaactcgtcatcgccgtaacccattcacaagccgttgctgaccacggaacacgggttgtccacatggttgatgggcagattgattatgacaagcaattaaaaccagcttacccagctccaactggtccggtaattaagaagagtagtccattaagttttatgtctgctttcaaaatggcaatgcaacacatgcgctacgatattaaacggaatttgctcattatttttggcgcgtccattgggattttctccgtcattttaatgctaggcttgggtcaaggggtgactggctatattaatgatcagatttcatcgcaagttaatccaaatacgattcagattgcaagaaacctcacgcgcaaacagattgaagccggtgaacaaggtaacttagctgataaggatatcaaccgccttaataaggtcaaaaacgtgacgaaggttgaaaagggctactacatgaatggtgtccaagtgcactatcaaaagaagagtgaaacagtccaaatgttccaaacgtttaataaaaccgaacgtgtccaagatattaagaccgggactaaacctggggccaacgaaattattttaacgaaggcaatggctaagaagttagataaaaattacaagaagatggttggtcggacagtaaccacttacgtcaatgccattagtaaggatcaacgtccagttcaaatgcgccaagatgtgaaagtttcagggatcatcaattctgggactgaagccgtcacatatggcacattagccaagatgtaccaagcgcaaggattagagtttgcacccaactttgcagcagtcacggttaataagacccaaaatgttaaagccgttcaaaataaaatcaaaacctacactagcaaagtcaacggtaagacacaaaaggattaccaaatcacaggggttggtgcgatcctcgattcaattaacacttacttgatgttagccttctacgtcttagctgggattgccgggatttcattattggtttcagcaatcatgattatcgtggtgctctacatcagtgtgtcagaacggacgaaggaaatcgggattctacgcgcaatcggcgcccgaaagaaagatattcggcacttattcgtctcagaagccttcttgattgggttattatcaagtgttcttggtgccggcattgctggccttggacaattgcttgtcaatacgttggcccaaccattaacgcatatgccaattgtggcaattaccagtggctacgtcctattcgggataatcatcagcattatcatcagtctcttagcggcactagcaccttctcgtaaggcagctaagttagatccaattgaagccctcgcggcagaataattgcgcttgaaaagtgcagctaagttctatatactagttatcaagttcgaacagtcaaaagaatagcatcaacagcgatttatagcgagctcacagacggtgtaaggtgggtaatcaagttgacgcggcgcgcttttggttgaacaattgcatactattgagtggatcgattgatcaatcagagtggtaccgcgggaattctcgtctctttcatttatttggaagggacttttttttgttcacaaatattaggaggctatcaacatggattttaaacaacaagtcaccactgccttaatgggcgttttaggggacagtttaccagcagataaagtagcacaactcattgaaacaccaaaaacatcagacttaggggactatgcttttccaacgtttatcttagcgaaaacattacggaaagcaccccaacaaatcgcccaagacttagtcgcagaaatggatcaagccggctttgaaaaagtgattgccaacgggccatacatcaacttcttcttggataaggctacgtttagcgaccaaatcctcaaaaccgtcttaacgcaagccgctaattacggccaaagtgacctcggtaaagggggcaacgtgccaatcgacatgtcatcacccaacatcgctaaacccatctcaatgggccatttacggtcaacagtgattgggaactcaatcgccaagattttgacaaaagtgggcttcaacccaattaaaatcaatcacttgggtgactggggtactcaattcggtaaattaatcgtagcttataaaaaatgggggagtgaagaagaagttaaagaagacccaatcacgaaccttttgaaatattacgttaagttccatcaagaagacgttgaacatccagaattagacgatgaagcacgggcatggttccgtaagcttgaagccggggatgaagaagcaacgaagttatggtcatggtttagaactgaatcattaaaggaattccaaaagatctatacgatgttaggggtcgaattcgactcatttaatggtgaagccttctataacgacaagatggacggtgtggtcaacgcacttgaagcaaaagggctcttacaagaaagtcgcggtgctgaaatcgtcgacttaacagcttacaacttgaacccagccttgattaaaaaatcagacggcgcaacactctacatgacacgtgatttagccgctgcgatgtatcggcatgacacatacgacttcgtgcaatcattgtacgttgttggtggcgaacaacgggaacatttcaaccaaatgaaggccgttttaaaagaaatgggcaacgattggtcggacgaaattcaccatattccattcggcttaattactcaaggtggtaagaaattatcaacgcgtagcggtcgtgtgatcttattggaagaagttttaaatgacgccgttaacctagcacaacaacaaattgaaaccaaaaaccctgatttaccaaacaaagaagaagttgcaaaacaagtcggcatcggtgcggttattttccatgatttgaagaatgatcgtttagataattttgactttgacttagaagaagttgtgcgtttcgaaggtgagacaggtccatacgtgcaatacacaaatgcccgtgcccaaagtatcttgcgcaaggccaaccaagaagtcgcaatggacgctgacttagtcgtttcagatgccaacgcttgggatgtcttgaagatgctcggcaacttcccagatgtgattgtcaaagccagccaagaatacgaaccatcagtgattgccaaatacgcattacgcttggcaaaagccttcaacaagtattacgcaaactcaaaaattttggcagacgacgatcaaaaaaatgcgcgtctttcattagtgaagagtgtcagcacagtcctagaagcctcactagacttattaggcgtacaagcaccaaaagcaatgtagagtgcgtttaaagcggtttgactctgagcatttgcctaatatcgtgaataagcgacgcagtcgattgtttgcgatatgtagcaaagcacaagagtcagctttaaaaagcatgtttaaaaacagagtgcctttgaaacggtttgaccttgaggattaacaaaaaaatagcgattatggcgggttttagccataaccgctatttttaggttaaccggaaaggtcagtttcaaaaagcacgtttcagatcagagtgtgcaagcaggcggttatatttgagcattaactggatttggcgaattgacgatgtcatcgtcgatttgataaatttggttaagcgcaggaatatgcctggagcacatttaagccacccgattaaatcaatctggtggcttttttatttttcgaaaaattctaattcgatgacaaccccgccaacttccgttatagtaatcttgaaatagtgggggagggttcactaatggtattagtcttaaaacgccagattaaagggattccggttttggaagtggtcgctgacgaacaacgtcatcagccattaccactcgtgatttactatcatggctggcggtcagcaaaagaattggttttaacgcaagcgcgtaaactggctgaagctgggatgcgcgtggtattaccggatgcactgaatcatggtgaacggctgcaacctgtttcagagattccgtcatggactttttggcaaagtattcaaaccaaccttgccgaattcagtttgattgttgattactggcaccaacttaatttaattcaagctgaccgcatcggcgtcgggggtgtttccatgggtgggatgacaacggcggcactcttaaccaagcatccagaaattaaagtggcggcttgtatcatgggctcgccggcaccgctagcctatgcgcgcttagttcgtgaaaatatccgtgcgcatcagttagcacaacctgacgatctagggttattgacaagttggttaacggcctacgatttaactgaacagccgcaggcaattgctcaacggcctgttttattctggcatgggacagcagatgaacgaattccctatgaacaagtagcagcttttgaacagcagattaaaggtcaaacttatgccaaaaacgtgacatttttaacagcaaatggtgaacgccatctggtgaagccagcgctgatgaacataattacagatttttttagtacgcaactataaaataaatcatttttaaaaagccaacgttaaattcttagcgtggctggtgaattagccctagttttcagctgaatccacgataactttgtaatcaatcttcaccgcagtcttattctttttggcggtcactgaaattggtccacctaagacagcgagtagattctccaaatttgccatgaccacaccagtgtctacggcaaccgcaatcgtctcggcagtcttctctttgaccagagccaatccgaggttgccctttacgaacgagaatcggcgttcaatttcgccacgccggttctctgcgtcttgatcttgccggcgctgcgctggatccacatgctttggcttacgtccaagccgcggtccactgacacggataccgaggttggcacacatgccaatgttttcgcgagttcgatacagtgtgtccaacagcacctcgtctggatattcaccatgcacatcgtaatagtgatcaagtgtcgaaccaagatcgctactttcgttgaaggcattgaacgaaaaccgctcaatatcaatcacgccatccatgatcgaaacatcgatcttcggtccaaattcaactggagactttgatttgccccgcatgatcgggcgaatttccggctgactcaagcttacgatccggttttcaacgcgatgcgtgtggttgcgatacatgtaatcttgttggtcaaagactaagcgaatgacgccaagtcgctttgcccgcgcagcagttaaagtcgctcctttgtcgatcatcgcatccacgtaccgcaagtcgcgacgaatgtattggagctgggctttgatctgcttttgcgtcaattttccccagcgtcgcggtttgcgagaaaaggcagtccactttgcgtgagcttcacgcttgtaagtccgtggcggtgcgatttgaagctgtttagccataactttaatgtcatcttctaggtttgttctcgcctgattaagcagatgcgtatcttgggggaatttaatgtttactggtgtgcacgtggcgtcagtgatcatcaccgacttggttggtaagtggcgttgaagtcgttcgcgaaccgcatcggtgatgatattgcggatcaattctgaaatcggcgcgatccgccgacgaaagtacgccagtgccgtgtgatcaaacgggactttgagttgatactgcggaatgccaatgaagtattgataggccggagtgtcacgaatggcttcgacaacatctcgatcagataaaccagtccgttgcttgatcaactgggccccatataacaacctgaacggtttgccggcacggccaagtttcgacgggaaggctaattggtatgcctcactcaatttctgccaaggcatttgatccgcaagctgaacccattcgttgtctgcactaagtggtgtgctcaaagcggtgccaaaggactcaattgacagttgcgtgactgtttgacgataaaccatggataacgcctccgatagggttgtgataactgcatgggaaatcacggatatgccggaaaacctatgcatctattgtacaacgataacgggttaacggactgttacaaataacttggacaaattattcaccagccactaactatgtttacaagaactggtttagtcggctcatggacgaagtccatcagttggcgacctgaactgaataactgaataggtcgtgcgtcgagccgaaaactgggtcggtctgttcgtggtgcatcgatcaccaacttctccgctcagtcagtattcgcaacgctccaaacgttgctttcagaccggccagatgcgatttcatgtcccaaataccgaggtgaataatccaggttaaagtctttgccttcagagaaggcattaaagtctaagcgttcgatatcgattacgccttcgcttagagaacaatcaatcttcgcgccgaattctactttggcatttgctttgccacgctgaatcgggcggatgtatggctgttggagactgacaatacgattttcgacgcgatgcgtcttatgggtatacatgtaccactgttggtcaaacaagatccgaatgactcccaggcggattgcctgcttttctggcaaagttgccccaaggtctaagaactcgttgatgtagcgcagatcgcgacgaacgtattgcaattgtgctttgacctgcttatgaaagccgccgcgttgttgctttggatggcgcgaaaacgccgtccaacagtgtttggcttcacgtttatacatgcgtgggttcggcacacccaattggtgtgccatatcgattgccatcgcttcaagattgagccgagcctgattgagcaacacagtatcttgcggatacttgattttaacgggtaccgctgttgcatcagtgatgactgtgtctaccttgaacgggaccaacgcttcaatcttagcccggacagtgtcgttgacgatattggtaatcagctcagaaatgtcggcaatccgcttgcgaaagtgagccaagctggagtagctgaatggcgccactgctttgtactcagacaaaccaatgaagtattgaagcgccggtgtatcccgaatcgccgcaactacaccacgatctgttagccccattcgttgttgaatcaaaccagcaccataaagcatgcgaaaaggcttcgcagcgcggccaagattcttggtaaactccaattggtatgcgtcatcgagcgccttccatggcataacctccgccaattgaacccattcgttatctgggctaagaggtgtgcttagaccagcgccaaaagattcaaatgatagttgaagcgggctgtgacgatatgccatgagataacctccaaggatattctggaaaaatgcacgagaaatgtgcgaaatcggtaattttctatggatttattataacgcaataatgagcttatgggttgaaatgcttgaacgttatagtttttaaacggccactatgctattaattgcaccgatgtgacagcgtgagttaattttaactcggtctccaatggatatctgaggcgtatactgaaaatctttgaacgagtcccacgcctctattcgacaccctggtcctccataaaactgatcaccaatagaaatatactccccgcctcttatacttaggctctctgtaactctagcttgcttcccaatccgcacaactttttttaattcatcttctgaaagcaaatgcaacaattttgaacgtaaatgtcggactattttagcaataattctcattgatatgcactccaactgtattaattaatgagttcccttacaaagttaataacctccgagaattggctattgcccttgtaataatcggtattggtctcaatttcgaatttcatcgtttgactacgtttaactgcggtgttaattcccatagccaaatcatcaaaagtggcacgattgacggaaataatgtttgagctgaatgtgcttaagtctttgcagatgaaggaatttgttacggtttgaacgccagcagtagccatttctaatggcggataactagggtgaggagaactcatcaatgacagacccacacgactagtcactaataattgagcgtaatcttctaatgttagctttcccaatgaagttaatttgaagccatcagccaactcaatatctcgatgttttgacccgattgaaataaaattccaagatcgatctggacgatatctcgtgatatatgtgtttagggaattcacagcgagtgcaaaacaatttctgtcttcaaacggacgcccatacatgagaacgttattcactttcggttcttgatgttttagcgcttgctgttgcatagtatctttcattacagaatttaacactggttcaaaatagactttggaatcgaaatcgtaaccgttcaattcaaaatatttgtaaagttgagatgagttgaatatcgccacagtatctttagctttataagtcgaatcaactagcatactctctgatgaccaattaaaaaatcctggctcatagtcttgaatcaaatagaaagttttttgagactttgaaaaaaaatcttcttggcttttagtcaaattttctattacgtacttggttcgccaagacgtggccaagaaaatatcattagcccgaattggtaacatattatgagcacgccaagcaggatcagcagcacatactgtggtgctcgaatcgatgacatcctcctcagccttaatgaacttataatttggatattctcgtatcagatctttatccacaggaatgtcagtaattataattcttgtctccatatgtaacgtgtttgcaagggtattgaaaagtttaagtgccgtgctaataccgccaaagacgtagcggtggtgcaatttagggagtagtaaattcagtcttggtgtgtcagaagactcattcgatttcttaaacttaattaaattcaagtaatcaaaatcaatattgtcatacttattgaactttttttcggctattctaactaatttgttcattttgcgtcctctctcgcgtcaaaatatgctgactcgtccatgcttcacagatgaatcccaagaatataaagtaaataaatgctgttggaaaaaacctaaagagttcaaagaagaacatagaaatgctcattgttacaaatgcagcagcaatactttgaacctgaacatctttagtacgaaaaatcatcagaaatgaaatcaagatcatcaagcaaacaaccaataacacgattatcccttgatcataaaaagtggtaagaaattgattatccgtttcactaaaatcactcattgttatgctaacagagtccatcaataccgaggctgcatccagtccgtggccgatcaatagtgagccaaatgaagtagatggaataacctgatgaagaaaatatgtaatggtcccagtccgctgtaacgcagacgaatcagatgaaagattattgaaccggagaaaaattgtatcaaaaaccccagtctttgatagaacaagcacaataaaaggtaggcttaataaacatatgagtatgacaaacaatgtcttcgaatttacttgccgaattttgaacaggtaccaacctccccaaaatagtaagactatggctaatgcaatccaagctgaacgtgactttgttagaaggagattgatcatcaacagtaccatcagaaacatatttgtcttagtatgttgaaaaaagccaaacattagtatgatcgaaaccgcaactaaaacagaataaataataggatggatataaaacgttgcaattctataattacttgggctgaattgccaataataacgatttgcaagcccattactgacgcaatagttatatgcaattctattgaatttgataatggcttcataaattccatacaagccgcacacgcctgcaataaatatagtcattgtcttaataaacttaactagtgtatctcgacaatggaacaaaataatgcctgcaaaaacgcacgcaaattgaaacgtgactcgaagaaataaggatagggcatcctggtaatgtgtacccaagtatacagccacaagctcgaaaatatacactccgaatattgtcagtaatagcgttaaatttgatctacgtagtgcatttgaattattcagaataaacacaactaagaaacctatgaaaattgtgtatgtaatccgtccttggttaccacggataaagttcagcaacacaacaaaaaataatattcccagtattgtgactggatttttcaacctgagtttgctcatcataacttggcgaatcctaatcctttcatgattgatgtcgaatatacattattctgagtaatggtccaaaaagtgaaacacgacaaaaggcaacaattagcacgtccttccatgattgagtaacaacccgtcccctaaaaatatcattattaacaatgaacttgctgaggagcttcttctgctctccaaatttaagatccgttcctgttcccatcagaatgttatcgatataaacttttagatagggtagttttctttgatctattaattggcttgcctcttgaccaaaaaaattttcaagcatctttttttcatgactcagtgataactcaaccgatacacatctattgtaattaaactttcgtgatgtactatttccaggtctagaataatgaaaataatacacacttggattgacacaaattttgatattcggtgacgcttcaagacagtcaaacatgaaattacggtcttcttctccggccttcatttccgtgctgaagtgaacatgatttttctccaagaaatctttccgaaaaagtccatcccacacatacaaaaagatgggcccatcactcaacgctacgaaattttcgaaaagattatctcgcgtaatcacgataggttgcgaggttgtaaacttagtatcaacggaggtcttttcggaaataaaccttcttccaaatttaacgatatctacatcttttgacttcgccaatttaagattgtctgcaatcagatctttttttaataaatcatcattgtcacaaaatgcaatccattttccttcggctaatttgatgccagtatttcgagcttgactaattccagaatttttctgagaaacccatttaactctattgtcttcgagttgagctctcttgcaaatttctgcgctattatctgtagatccatcgtcgataagaattacttcaatattcttgaacgtctgtgacaggatactttcgatggttttttgtaggtagttttgtgcattgtaaacgggaacaatgatgctgacttcaggattcacacttatcacctctcatatactgaagggttcggaagaatctgatcaaatgccgatattagatcacgttttcgattctcaaaatcaaccgattcctcaggatcatttaagcaaatcatcttctgtttctgcttagtaatgccttcagtgatttctacaatattatcgtcttcaacctcgtatctaagtcccatagcagcatgaggactaaacttgccagttgcaatttgccagtatctgaaaatgtactggttaacgtcataataacttctgaatcgatgatgccgagttgcatctagcggtttaaactctttactccatacttcatccagcgttgacttaagcattgcaactgggaggtgtgcatttttgaaacctgtaaactccttccaaggaagtaaaaaaagatttcgaacgttctgagcgccgtaatgaggattaaaccattttccaaaatttttcttcatttgtgtatacttgtcaaaattccggttgatgatatctatgtcattcaacatttgatgacagtaagcactttggtcccccaccgacgcaatcgtcccttgcaatccttccaactttggaagtccctgtgcatcaaagaaatcctcttggtcgactgagttcaataaaaacatgtcatcattgaagtaaatgaaatgttctgctagattcgggatttgattcatattaacttcaatggcgcaggaattgaacagtggcagacaatcttcaggaataaaatcttcatgtcttactacgtgtagctttggcgcatccaaatttaagaagttcggcagatgtccatatgttacaaaatgaatttttctgacccatggtgcaaagttttcaatcgcacgaaaccagtatctcattagatcccaatcacgaaatcgattggtcgaattattgactttatccttatcactctgatattttgctttttcagcaacccatttgggatcgtttccatccacccaaagaatcacaacatcaatatccactctcttatcctctttaattaatattatttgttttcagtatcacgtaaatataaatcataaaacctttcattcttcattttttttgcatacgttgtatgtcgaatacacgattcaacatttatcaatgggatccttgcagccatacgtttaattgaagacgaaataatttttttgcgtgagtctttatcatccttccaactgccctcgcaccgatgcaaagcatgcttctttcctatgattggtccaatttcgaattcttctttggaatatacactaaaatcattgaggtgttgggttttgccattcaatttaaaatcagaatactctgtcttaagataataggtgagtaaatcgttattgcatgtgaaattgatgtttccgaatctttttacataaaagtttttataatcatcatcccagtatgcttcttcgtataagtcaatcaaatctccaagaattcgatgatgcttgactgaacccatgacggccgtaccaatactggaatcaaaaatatagcccacaaaaaatttttccgttaaaagagtatcaaagtttctcgttaattcaacgtctgtatcaaggtagatacccccctcattgtataacgctactaaccgaaagtagtcgctaacgaatgcccactttttttgttctacagcctgccttacaaatttgtttgcagaaaaatcacaatttgtttcgttccattctttgataaggtaatcagtctttaatggccaagtggccatgcattcttttacattttgacttttttcttgtgaaccaaaccaacaataatgaattttccttggaatcataagttagcctccatctccaattttcttaaatactgattgataaattcaatcgcagtactttgatgtgatacatatggatctaactctacattcatcacggtttgtattgcctgggacaacccagagatttcagtacacatcacaacctgattattgcttgaaaatgcctgagctatttctagctgatggtcatcaacgtgttcaccaaatttactcaatctcggaaccactaaaacaggcttattttttttctttgctgtaattatactacctacaccgctgtgcgtaattacaacactagaacaatcaatcaactgttcaaattcttcctgattcacaaagcgcttaaactgataatgttgtggttcgtaatcagaatgaccaatttgtgcaaaaacttcttcacgtaacgatccgttttctactaacacgtcaagctctttgagtaacctgttgaactgaaacttttgtgtccccaaaatcacaaagatcataaaaaaacctcactaaaaaattgcgccaataaactttgctttcggatagtattttaataatgattcccattgtactaaaaatacatccgcaaaatgatatagtattcttccagttaacgacggccgctctgtacgtgcaaaagattcaatatagattacctttttcctaaacaattttgccatgatgcatattggaacggttgccaaggcacctgttgatattaccatttgaggttgttcttttctgaaaatcttaaattcgttaaagatcagcttcatgaaatggatgaagaaaaatttttcattccggtttatctgcttgacataatacgttgtatctgtcaggttttggtcaaggtcatcgcttttttctgtgacaataaagtgattcgtcgtatccatgatttttttcaaacacatcaactctgtgagatgtccaccggaagaagcacaaaaacagattttcacgattaatcaatcctccaattgagtcatatatagttaattaagttgatgatttgaaaccaaactaacacatgtactgagcattctgaatctcaacatagcttgattagtatatttgagatggaataaaaaaatcgtaaccgatttggttacgattttttgctgtttaatagtctaattgtttcaaatgaaggaggaagtgctgatcatcaatcggttttagatgataaagcactagaattttacgcgttaactttggttcaatcggtgcagcatcgtcgaacatatggaagtgatcgaaaaaggctgtattgacttgttcgattaacgttaaaatgccggcactccctaaatcgaacccaagatggtcggtgtctgataattaactcgccttaatatgggttaagtattggatcagttcgggtcccattgccataattttatcgggcacttgggtcgtttttaacagtgcttttaaatctgcgattgtattagcgggtacttgttcaatcgtcatcataaacatcgcctttctagcagatatgtatctgcttacattcctaatttaacagatattatcaaaatgtctagtggatctggttgaattaatcgcgctttgcgcgaaatttcgctataataagtgcaatcgtttaaaagtggaggacaaagagatgacctattcagaacaatgggatttagaaccgatttttgccggggggattgattcaccagcgttgacgcaacgattggcggatttgactgcacaaatgacgcccttattagaagcggtccagaactggacgtttgcgacagatcagccaacatttgcaacgctaacgcaaatcactgaacagttacaagcgattgaagcgggtctcaagcaaacggggagtttcgtgaatatgattcaatcaacggatgaacgtaatccgcaagttgcaccgatgatggggcggattaatgcgcttgaaaatgatgcgaatcagattgatgtcgcactcacaaaaaaattggtcgcaatgtcagacgcagattttaaaaccgttgtatcgacacctgccttacaagcgattcagtttaatctaaccgaaaaacggacgaatggtgctgaacttttggatgaagcgacggaaaaactaattaaccagttcgcgttagatggtttaactggatggagtgatcattacgactcattggttgctgaaattcaagtccccgatggtgagacgactttatcggcgggacaagcgcagaataaatttgaatctgacccagatcccaaggtacgccaacgcgtctttcaaaattggtaccagacttgggatcggtattcaccattattaacggatacgttaaatcatttggctggcttccgcctaacggattatcaagcacatggcacaacggactttttgaaaaagccattggtaacgagtcgcatgcaacccgcaacgttagaagcgatgtggtcgatcgttagtcaaaataaagcgccgcttgtcgattttctaaatcggaaggcagcgttaatgggcaaagaacagcttgcttggtatgatacctgggcaccagtggttgtaggtgattttcaaccgcagcgttattcttatgatgaagcagcggtttttatcatgcagaactttaaagcgttcagtcccaagatggcttcggtggcacaaaccgcgtttgaaaagcgttggattgaagctgaagatcggccaggcaaacaaccaggtggttatatgactgatttacctgaaacggatgattttcggatttttatgacatttgatggcacccccaatggtgttgcaactttggcacatgaattagggcatgggttccatacaatgatgattaatgatttaccaagttggcgacaagactatgcgatgaacgtcgcggaaacagcttccacttttgctgaactaatcgtcagtgatgcgactgttaaagcagcgcaaagcccagcagcgaagattaatttattggatcagaaaattactaacgcaattgatatgtttatgaatattcacgcacggtttttattcgagcgacatttttatacagcgcgccaaaatggcctgcaaacaacagctgatttaaaagcactcatgctagccgctcaaaaagaagcctatgcggatgcgttgactgattatgatccgctattctgggcggacaaacagcatttcttcttcgatgacgtgccgttttataacttcccttatacgtttggctatcttttttcgatggggatttatgccaaggcacagacaatgcctgattttgaagcggactatatcgcactattacgtgatacggccaatatgtcgactgaagcattagcgcaaaaacatcttggggttgatttaacccaaccggatttctggcaagctgccgcggatagcatcgctaaagatgtacaacaattcctagctttgacggcggactatctcagataatgacatgctatttttaaagtggtatatcatggtataataaacgagaatcgggcgctcacactagttggagtgaccaaattgatcggaggttttgaaatgccaacatatgaaggtagcgatattcaagcagcggtaaatgaagggttgcaagctatgcatctaacgcgtgaggaagtgtccgttgatgtattggaagccggcaaaaaagggtttctcggttttggtcgccgcttagcagttgtccggctaacgccaaatgaacaaccaagccaagttaaacaaagcgccccagccccagttcaagagctagttgaaccaacgccaacagacaatttaactagtacgccgcaaaagcggaaaagtggtgtggaaacggaagctgagttaagcgcctatttggaagccatcacggctcaaattggcacaccggtcagcattcatgtaactcacgaccatcggagtacgacttatcatttgaagaccgataaagaaggcttgttgattggtaagcatggtaagacaattaatgcgctccaatatttagcgcagacttactttgatcatcatatgaagggcaagcaaaccattatcctagaagttggtgattatcggcagcgaagagcagcgattgtcagccaccttgccgataaagcagcccgtgaagtcgttgcgaccggcaaaccagtctttttagaaccaatgccggcttttgaacgcaaaattgtgcatgggcatttagcaactaatcaccatgttcaaactcattcagaaggccaaggcgatcgccggtcaattgtggtggaattagcgcgcacattttaggtgttgtgaattgacgctctaaaaaaatcgtgtataatgaaactaattaaatatcgataaagtagtgaaagtgctttgtccaccccttacgcaatgacgggaggggtggacgctaagcgctttttttatgcagctatttcggaaaggaagcatttaaaatgccaacgacagtcacagaatttgatacgattacggcgatttcaacaccacctggtgagggggcaatttcaattgtgcgtctttcaggggatgagagtttagccattattaaacgcgtttatcgcggcaaagatcttgatcaagtggcgagccataccattaattatgggcacattatcgatcctaaaaccgacgcagtagtcgatgaagtcatggtgtctgtcatgcgcgcacccaaaacgtttacccgcgaagatgtgattgagattaattgtcatggcggaattgtcgcaacgaaccgcatcttacaattattaatgagctatggtgcacgaatggccgaaccgggtgaattcacgaaacgagcctttttaaatgggcggattgatttaacccaagctgaatctgtgatggatctgattcgggctaagactgatcgggcgatgcaagttgctgttgatcaattagatgggagtttaacgcacctgattaagaatttacgccaagaaatcttagaagtattggcgcaagttgaagtcaacattgactatcccgaatatgataccgatgaaatgacgacgcggattctacttgaaaaagccgaacttgtgaaagcgcggattggtgaactacttcaaacggcacaacaaggaaaagtcttacgtgaaggcctagcaacggccattgtcggacggcccaatgttggtaaatcaagtttgttgaatcacctattacatgaagataaggcgattgtgacggatgttgccgggacgacgcgtgatgttttggaagaatatgtcaacgtccgtggggtaccgctgaagcttgttgatacggcaggaattcatgataccgaagataaggtagaaaagattggggtcgaaagaagtcgcgcagcaattaccaaggctgacctgattttattagttttaaatcaaagtgaaccactaacggttgaagatcgcgagttaatcacggccaccactgataagaaacggatcattattttaaataaaaccgatttaccgaacttgttagacttaaatgaactccaaacattggtgaatgcggatgaagtaattcaaacttctattttaacaagcgaaggggtgaccgatttggaagcccaaatcgccaaactcttcttcggtgggattgaaaatagtcaaagtacggtcatgattactaatgcccgccaaattggtctattaaaccaagcacaacaatcattagatgaagtcatcagtggaattgcagctgggatgccagttgaccttgtgcaaattgatatgaccaactgttgggataagctcggtgagattaccggggattcagcaccagatgaattgattacggaactctttagccaattctgtttaggtaaataggtcttgaaccatattaaaggagaacaaaatatgcgagaatatgacgcagcgcactacgacgtgattgttgttggtgccggccatgcaggttctgaagcggctttagctgctgcacgaatgggccgcgaaacattactattaacgattaacttagacatggtggcttttatgccatgtaacccatcattgggtggtcctgctaaagggattgtcgtccgtgaaattgacgccttgggtggtcaaatgggccgcaatattgataaaacatacattcaaatgcggatgttgaatacaggtaaagggccagctgtccgcgcgttacgcgcccaagctgacaagcacgcttatcaccggacaatgaaacggactatcgaaacgacggagcacttaacacttcgtcaagggattgctgaatcattgatcgttgaagacggtgtctgcaaagggattgtcactaacactggtgcccgttacagcgctgatagtgtgatcttaacggctgggacagcttctcggggtaagattattatcggcgaattaacctattcatctggtccgaataattcaattccttctattaaactttctgaaagtttggaagacaacggatttgtcctcacgcgttttaaaacggggaccccaccacgcgtggacggcaccacgatcgacttttcaaagacggaagaacaaccaggggataaggaaccaaaccactttagtttcgaaacacctgatagtgcttatttgaaagaccaactttcttgttggatgacatacacgaatgatacgacgcatcaagtgattcgcgacaatctcgaccgcgccccaatgtttaccggcgtaattgaaggggtgggtccacgttattgcccttcaattgaagataaaatcgtccgcttcgcggataagcctcggcaccaaattttcttggaaccagaaggccgcgaaacagaagaatattacgtcggtgatttctcaacctcaatgccagaagaaatccaacacaaaatgattcattcgattgaaggcttagaaaatgcccaaatgatgcgtcctggttatgcgattgaatatgatgtcgttgaaccatggcaactaaaaccaacccttgaaaccaaagtggttgaaaatctttatacagccggtcaaatgaacggcacttcaggatatgaagaagcggctggtcaaggcttgatggccggcatcaacgctgctctgaagcaaacgggccgcgacccattcatcttggaccgcagtgaagcttacatcggggtcttaatcgatgacttggtcacaaaggggacgaaggaaccttatcggctattaacctcacgtgcggaataccgtttgatgcttcgtcacgataatgcggatttacgcttaacagaaaagggtcatgcattaggcttaatcaatgatgatcgctttgacagctatgaagtgaaaaaagcagccgttgaagctgaattagcacgtttagcaaccattcgcttgaaaccaaccccagaaatccaagcctttttagcggctaagggtgaggcaccacttaaagatggtgttttagccagcgacttcttaaaacggccagaagtaaagtatgctgatttaatccaatttattccagcagtcgaaggcattgataaccgcgttgtggaacaagttgaaattcaaatcaaatacgcgggttacatcgataaggaaaaagctaaaattgcgaagttaaaacgaatggaagctaaaaagattccagccaatatcgattacgatgcaattgaaggccttgcaacagaaggtcgtcaaaaattacaaaaaattcaacccgaaacacttgcgcaagccagtcggattggtggggtcaacccagccgatatcgggattctaagtgtctatattcaacaaggtaagattgctaaggtcaaatagcctggttgataactagtcattagatatgttagagttaagcatatattgtcaatggtagaaagccagccgtttcacatgaaacggttggctttttagagtcatgaaagaaaagtgagggaatcaagtgataactgttagtgaaatgagcttaacgctttctgggcgtaagttatatgaagacgttaatttgaagtttacacctgggaattgttatggcgtgatcggtgccaatggtgcaggtaagtcaacttttctaaaattattagaaggtaaattacaaccatcatcaggccatatctcaatgggccctaatgaacggatgtcgagtttgaaccaagatcactacgcttttgaagaatttgaagtgttagagactgtgattcaaggtcataagaagttgtatgaagtgatgcaagctaaggatgccctatatgctaaagctgatttcactgaagaagatgggatgaaagctgctgatttagaagctgaattcgctgaaatgaatggttgggatgctgaatcagaagctgctcaattacttcaagccttagggattgatgaatctttacaccatgtgaagatgagtgaattgatggaagggcaaaagattaaggttttacttggtcaagcgctctttggcaaacctgatatcctattattagatgaaccaacgaatgggttggacagtgcctcagttgaatggttagaagatttcttagcagacttcccgaacatcgtgattgttgtttcccatgaccgttacttcttaaaccaagtctgtacaatgatgtgtgatgtggacttcggtcgcatcaagacattcgttgggaactacgacttctggttagaatcaagtaagttagccgctaagttacaatcaaacgttaacgctaaaaaagaagaacaaatcaaagaattacaagattttatcgcgcgttttagtgccaatgcttcaaaatcaaaacaagccacttctcgtaagaaacaattagaaaagattacattagaagatatccaaccctcttcacgtcaatacccattcattaagttcgatttcgaacgtgaattggggaatgatcttttacgggttgagaatgtttcaaaaacaatcgacggtgttaaagtgttagataacatcagcttttcagttaagccagacgaaaaagcagcaatcgtttcacgaaatgacgttgcgacagctgtcttaatgcaaatcttagcaggtgaagtgcagccagatactgggacagttacctggggtgtgacaagtcaacaatcatacttaccaagagatacgaactcagccttcaatgatgatcaactcatcatcttagactggttacgtcaatttgccgctaagggtgaagatgacaatactttcttacgtggtttcttaggcaagatgcttttctctggagatgaagtcacaaaagaaatcaatgtcctttctggtggcgaaaaagtgcgttgtattctatcgaagattatgttgcaaaaatcgaatactttactattagatgatccaaccaaccatttggacttggaatcaattacttcattgaatgatgctttgatcgatttcaagggtgctttagtctttacatcgcatgatcatcagtttattcaaacaattgcagatcatatcattgaagtatcagcgaacggtgttgtcgaacgtgctgaaacgaactatgatgagttcttagcacatccggaattacaaaaacaagttaaaaacctctacgtttaatagtagaaaaacgaaggcccctagtatagctaagggcctttttttattgttataagataattattatttatttacagaaaatccttgcatcacgggttgcaagttggtatactaataaagttgtcaaaagcgagctgattagtgataagcagtatcgtcaattaaataaaaagttttgaaaaacacttgttatttaattgaaaacatgataacatattatatgttgcttaaggagttataacttctaagtaataattaattaaaaatagttgttgacagacgatatatcactgttttaaccgtatatattcattaaccgaatgacaaattgactgtaaactaaaagtccgctgatacgtttaaacgcgtatcggcggacttttttgcaaggtgttaagcgttctttaaagcaacctgagctaacaataggccaccggcaatgccagaattgttacccagtccagcgggaacgatatagtcatccagtggtgggacttcttcgtagccatttagataggcggcaaacttttcacgaatcatgggaaagagctgccgttgattcataacaccaccgttaagaataattttatcaggtgcgaaggcgacggtgaggttgacacatgcctgtgcgatgtagtcagcgatgattggccagaccggatcgtcaacgggaatatctttcccagctttccccgttcgttttccaactgctggcccagcagctaaaccttctaaacagatgtcatggtaaggacagttggacttgaaatcgtccccaggtaaccggttgagtcgcatgtgaccaagctcagtatgagtgcgaccattaaaaatgtggttctgactaatgacgccagcgccaacaccggtaccaatcgtcatgtagatgctgttagggacgtccttagcgattccaatcattgattcgccataagcggcttcgttaacatcagtggtccagtagagtgggatgttgaatcgacttttaagatggcctaaaaagtcgaagtcaccccagccgggtttgggagtcgtggtaatgtaaccatatttcggatcatcgggattaacgccgatggggccaaatgaaccgataccaatcgcgtcaacgggatgagtcgtaaaatagtcgtctaccgcagtcatggtttcaatgggggttgtcgtggggatcgaaattcggtcgctaacttgcccgttttcagcgcccgtggcacaaacaaattttgtaccaccagcttcaattgcacctaaaagcatagtgtgcctcctgtagttaaaaatgtagtcttatttattctcctaataaagtttagacagttgtagcagcaactgagctagctgccggttcagtcaacgcaacgagcggttcaccagcttggacattcgtgactttgagtcgttcaacattagcgtaattggccgtatttgtgacgactagcatgacggttggatcatagttagcagcttttaaggcagcgacgtcaaacgttccgagtagatcaccttgatgaacggtatcgcccttctgaacgttagtagtgaagtgttcaccatttaaattgaccgtatctaatcctaagtgaatcagaatttcggcaccagcagttgttttgatgccataagcatgatggctatcataagtgacagtgatgaccccgtcagctggtgcgacgacctgatcagcgcttggcacgattgcggcgcctttccccatgatttcggctgagaaaactttgtcgttaacttgtttgagactttcgctagtccccgttactggtgcactgataatctcatcattaacattgatgacggtactcgttggtgctagtgattttacttgatcacgatcgtcaccgagtgttcgtttggcatagataaaagttggaataaatgcgacgacgaacgagatgacagcactgagcatgaatgctggaatcgactttgaagcaatcgaaatgaacccgatgactgatgcgggacccatcgccacggacagaacgtggaatagtcctaagaaagctgaagcaattcctgaggcaatcgctgcaaagacaaatggaaatttcatcttgaggttgaccccgaaaatagcaggttccgtaattccgagtaacgctgagaccccggctgaagaagtcagggctttttgcttttggctcttagtggcaaagaaaatagctaaagtggcggcaccttgtccaatgttggccatcgaggcgactgggaagataaaagaacctcccgttttggcgacgttagccaataactgggtttcaatagccgggaaggtttggtggagcccagtaatgacaatggccgagtagagaaggccaaagatgcccatgccaatccaaccagtcatgttatataagcctactaaaccgttagttaatgcgtcgctcaccgttcgtaagacaggaccgacgattgtgaaagttagaaagccagtgatgacaattgcaaacattggcgtgaacgtaaagtcaaatgcacccttgatatgtttgtggaagaacttctccaaagtagccaaaatataagcaacggccaaaacagggagcacttggccttgatagcctgcttgtgcaacgtgtaaaccaaagacgttccagtaaaccatcttgccggcagccatggtcgttgcaacgctatagccgttaactagtgatggtaagaccatgatcatgcccatcgtagcacccagataggggttgccaccgaagcgcttcgttgctgaaaatcctaagaggattggcaagaaagtaaacggcgcactagccatcgcgttaaccatttcggcgatacctttgaggccagggtaaacttcaacaactgacttcgccataaaaagatgctcggcagtcaaaacgttgtttagtgccattaatagacccccagcaactagtgcagggacgattggaataaaaatatcagataagactttgaggaagtccattaatggatttttcttttgacccgcagcggcaactgccttgatgtcatcgggggtcgcttctttaagacctgttttggcgattaaggcgtcatagactttatcgacatcgccagggccaataatgatttggtattggccgttagtttcgaaggtccccttaacgtccgcgtcgtcatctaaggcttgttgatcaatcttggattcatccttgatgaccaaacggaggcgtgtcgcacagtgggcggcggcttgaatgttgtttttaccaattgcattaagtacgcggtcggcaacttcttgatgattcataataattcactccctgagtctaaaattatttttaataatgcaagcgctttacagacccaataataacaagtctggaaaatatgtcaagcgtttgatacaaaattggattgcttgataatcttgttaaaaagccgaatttgaaacgctgacatgaaaatataatataaaaatgtcaaacgattgacatattggtgtaagcggttttataatggtaacaattaagtcgaacgttaaaaaggagctcatcgtcatgatatggaatcgtaaaacccgttataccccttatgaacagtggccagcaactaagctaccacagctcgttgcccaggcacgccagtctaagtggcggatgcaacatcatattcagcctacatcaggtttgttaaatgacccctgtggcttttcatactttgatggtcagtggcacctgttctaccaagtctttccgttcggtccggtacacggactgaagtcatggcaacacgtgacctctaagaacttggtggattggcatgatgagggcttagcgattcgaccagatacgccgtacgactcacacggcgcgtacacgggtacagcactaccaattgatgatcagttatttattatgtatacgggtaatgtccgtactgccgactggcaacgtgaatcgtatcaattaggtgcctggatggacacggataatcacattaaaaagctgtcccggccactaattgcgcatgctccggctgggtacacgagttcgtttcgtgatccggacttgatccggactgaccacggctactacgcgctgatcggtgcgcagacgactactgagatcggtgctatcttggtttatttctcaaaggatctgaccacctggacgtgtcaaggcgagttgaacgttcccgcaaatgcgcggggttatatgattgagtgtccaaatctggtctggatcgatcaacagcccgtcttattgttctgtccccaagggttatcgcaagcaacgatcccgtatcagaatatttatccgaacatatacttagttgccgatcaattggacctagctcaggcacaattcactgaaccccacgccctgacgcaattggatgacggctttgacgtgtatgccacgcaggcaatcaatgcgccggatggccgcgcgttagccgtcagctggattgggttacctgaaatttcctatccaactgatcgtgaaaattgggcccattgtttgagcttagttaaggaactaacgcttaaagatgggcacctctatcaaaatccagtggcagcggtggatgatttgcggacgacggcgcatgacctagtctttgagcaacaacgggcgacggtggccgctttgaatggcagctttgaactcttactgacggttcccgctgataaaacggtcacggttaacattgctgatcagcaggaaagtggccagctgcaggtgactgttgatgccaaccatggtcaggttatgattgatcggcggcatacggggaattcgtttgctgaagattatggtcagactcgtcaagtggagttaacggcccataagacgataaaaatccggctaatcatagatgtgtcagtctttgaatgctatattgataatggctattccgtgatgaccggccgtttcttcttaaacgctaccccgagtcgccttaacgttcaaggtgacactacggcagttaccggtaaagtctgggaatggcgccaatcagagcatactggagtcgataacaatgaaaccaaaattaaatgatgttgcgaagctagcgggggtctcagcgacaaccgtttctcgggttattaataaccatggctacctgagtagtcagactaaagaaaaagttttcgcggcgatgcgagaactgcattatcagccgaataatatggcacgctcactgcaaggaaagaatacgcgcttaattggcgtcatcttttcagatattagtaatccgttctttggtgaactggtgtcccggattgaaaaaatcttatttgctaaaaattataaggtgattttatgtaatagtgcggatgatccgcaaaaagaacgcgactacttacaaatgttgatggctaatcaggtcgacgggattattgctggtgcccacaatttaggtattgaagaatatcaacaatatggtcttccgattatttcatttgaccggtacttatccgacaatattcccatcgttagttcggataattaccaggggggctggctagcaacccagacattgcatcaggcgggggcgactaacgtggctatttttactggtaagtcacacgctggttcgccaacgaatggtcgccgtgaaggatatgaagcctacttgactgcccaacagctaacaccccatgtccatgaattaccgtttgaattgacccctgcgctgaagatgatggaaattaagacgattatgacacaacatcagtatgatggtattttttgtagtgatgatttgaccgctttactagtgctcaacgtcgcgcgacaactgtcattaacggttcctgagcaattacgcgttgttggttatgatggcacggcgctcatacgtgattatcattctgaattaacaacagtagaacaaccgttagcggatattagcacgttactggtttctctactattgcagcggattgaggatgcgaattgtacactggaatcaaaatatacgttaccagttaagctcatcaagggccttaccgcgtaactaaggagttaatcgtaattatggcagcaacaatcaagtggtggcaacaagccgttgtctatcaggtctatccacggagttttcaagataccaatcatgatggtattggtgacttaaaggggatcacggcccacctagactacttaaagcaattaggaatcgacgtcatttggctcaatcccatttatcgttcacccaacgatgataatggttatgatattagtgattatcaacaaattgcggccgactttggcactatggctgattttgatgaactattgcaagccgcccatgaccggggcttaaagatcatcatggacttggttgttaaccatacctctgatgagcatccatggttcaaacgcagtcgccaggaccgcaccaatcaatatcgtgatttctacttttggcgctcaggtaacggcaaaaaggcgcccaataattgggacgcggcttttggtggctcagcatggcaatatgatgagcagacccagcagtattatttacacacgttttcaacaaaacaacctgatttaaactgggagaatccgaccttacgagagtcagtttatacgatgatgacctggtggctgaacaagggtgttgacggttttcgaatggacgtcattaaccaaatctctaagttacccggattaccagatggtccactgaaaccgcacagtcagtttggcgatgctcgagtaacgaacggaccgcgagttcatgaattcttgcaagaaatgaaccaagaagtgttgtcacagtttgatatcatgacggttggtgagacccacggggtgacaccagcggatgcgctgaagtatgcgggcgctgatcagcacgaattagatatggtctttgaatttcaacatctgcgacttgataatagtcagcatggtcttggtaagtggagtacgcgtaagacaccgttagtggcgctaaagaaagtcattagtgactggcaagtcggacttgaagggcgggcttggaacagcctgttttggaacaatcatgatacgccacgagcggtctcacgttttggtgatgaccgaccagcatatcgggtacgttcggctaaaatgctcgcaacgtgtttacacctcttacagggaaccccgtatatttatcaaggtgaggaactggggatgactgacgctcattttactgaactagccagttaccgagatattgaatcgctcaatgcctatcgtgatttagtgactgagcgccagctgctatcaccggcagatatgatggcccgattagcggcgcgttctcgggacaactcgcgaacgccgatgcaatgggacacggaggttaacgcgggttttagtgacgcggcgccatggctcacggtcaatcccaactatcgtcaaatcaatgctgccgcagctttggctgatccggattcagtgtggtactattatcagcacttgattcaattacgacatcaataccccttagtgacgttaggttcgtttgagctcttgtgggccgatgatccgcaggtattcttatatgcacggcaatgggaagggcggacctggctagtttgttgcaatttcacagccgagacactgtcccgaccactggatcaatatctgacgcccacggccaaatgcttgattagtaattatggcgagcagcagccaaataaattacggccttatgaggcttgggtctaccaactcgcataggtatccaggacttggctaattgaggcggtccttgaaatatacccaatcgttacgattagtgtgaattgggttgctcaaaattctgcgatggtcttaataagcgaccacctgactaaaaaactgcttttaaaaggataacttttgaaagcagtttttttagcgcgcgacgaccacttggcccacgtgaggctcatctagtcgttggtgacctggaatgaagcccgtgaggttaaacggtagttgttcatcgatcgtcgtggtcaattgaccagtatctagcaacttgaatagtaattgtaaggcggcttgatcagaaatcacttcggtcggttggattgcttggaaacgaattgatttactgttggctggcaagtgacgggcgaatgaagcgatggtcgcatcaaatttggccgttgctaagtcatctttgccaccaacgccatcgatagcgacattgattacgacgtcaccgcggtcggctaacacgtgaactggattttgatgctgatagtcgacgaattagccgactcccagtgtcgcaatcaagttagcataacggtcactagcaatctcgataacgtgggcatctaatcgtttggctaactgaataattaacaagccgactgggctgccagtgcctttgacaatcaccgtttggtcggcctggacgtccgcaaagtagcgcaccgttttgtaagcgacaatccctggagtgactaagctgacggcggtgaccggatcaagattagttggcatggtcaccgctagatcgctatctaaacaaacgggtctagaatttttggtgttggaaagtatttccccagtttacaattcaagtgcaacaccctgacgactagaccataaaggccatgaaggcctattcttgttagtgctagctaaacaagaaagcaggaatcttcatgacccactctcagactaacacccacaagcattaccaacaactcagttttagcgaccgtgctacaattcaggcccttcaggctgcattattttattaattatttttttaactcgtcgtttgtaaaattaagttagaaataaaaaagccatttgtggtagacttttgaatatccctaatcaaaagagaggtaaccacaaatgacttataaacatcttaccacatgtgaattaacctttatatataacttttggaaataagatattaaagcctatcatgccgctaaagctcttaaacgttccagcgaaaccgtttatcgtgtttaccggtttctagatgctggtaattcaattagtcaatttcaagaaaatcatcgagttaataaaactcattgcggtcgaaaagcaattgaattaccagaagatgaaaccaaatacattaagcagaaactcgcattaggttggacccctgatacgattattgttcgagctgagatacagatcagttgtagtatgagaaccttataccgactttttcaaagaggtgttttcaatgtgaaattgttgccaatgaaaggtaaaaggcatccaaatggttacgttgaacggcgtggtaaagctggccgactcggcagaagtatttatcaacgctatcaggattatcctcattttcaacatgaatttggtcatttagaagcagacaccgtccaaagcaaagcacatcaaggtgcagttatgaccttagttgagcgtctctccaaagttgaaatcattttaaacatccaacaaaaatcggctgaatgcgttaataaacatcttaatcaatggttgtcccaacagccaaaacaccttttcaagtcaattacttttgataatggtaaagaattcactggttggaaagaaatcgcaaataagcatgatattagtacttattttgccgaagttggggctcctaaccagcgtggcttaaacgaaaataataatggactaattagacgagatggtctcaacaagagcatggattttcgcaatttaccaaatgctttagttcaacaagtcagtagccggcgtaatcgtattccaagaaaatcattaaattataaaacaccaattgaggtattcatggaaaacatcacagataaacagctatgttatttctaacttaatttgacatttcaagagactaaaaaaggcgaactatcgcatttatgtatgccatttctgaaccacaaaaattttgaaagcgccttgattgctaatttatatataaatttaaagaatgtctaataaatttgcttgttaatatacaaatttaaaaattagtcatttttttggcattttttacttatattatatttcaaaaattattcttgttgaaataatttttgcgaagaaaatgagattttcttactgaataaccgaattacccacccaattttcatttttcgctattccatattgaaaatgtacttcaactattttcaataataatttgctcagtttatttttttatcactagttccactctcctatttttagcacgccccgctgatgtatcgttagttgctttggggttattttcaccaaaagcttcaattgagacgttgccttccgtcactgccttttgctgcacgaagaaccgcatgactgaaactgctcgagcagcactcaattcccagttacttggatagtctttcgattcttgtggcacattatctgtataaccagcaataatgacctcattttcttttagttgttgaatttttggccccagttcctttaaagctgcagcagaatcggcagtcagatccgcactaccgctgtcaaataaaatattgctatccaaatttaaatgtagtccgtcagacttgagtgaagcttttgtgttttttcccaagttcatctctgcagcagtttcgtttaaactatgagcaatttcttttaattgctgttcttgattctgttgtgaaatactgccctttactccattttcttgtttgatcgctgcttttttagttttagggtccggtgcctgactatctttttctttattagttactgatggtgaatcaagttcgattgcgtttgatccaccgactgccgcacttttatgattttgttgctctggtgacaaagccatgatcgacccaaactctgaactgattttttggaacttactatcatcgaccttggctgaagcaaacatcacaataaacagggcaagtagcaatgttaacatgtcagaataagggagcatccaggcttcactatcactatcattttttttctttttcttacgcatgcctgtcccactttctttccaatctactcatttttttcaatgtcagttcgtctggtttcactgatcatactttcaaggttcttttccattgttttcgctgaaactccttcttcgatcgccaatgtccctgccatgatcagttctaaattttgaatttcttgttctgatttacgttgcagtcttttagcaaaaggcatgaacactaagtatcccataaaaataccaaataacgtcgcaacaaaggccgatgagatcgactctcccaatacactaacgttatctaagtgtccaagtgcaccgatcaagccgatcacggcacccatcacaccaagtgtgggtgaagtactgccggcagtttgcatcatggcagttcctttagcatgccgttcctcgatcgatgagatctcattttccatgatttcttcgatttcttctttatcgatcccgtcgaccaccatctccatgccgcgttttaaaaacgcatctttttctggatctaagttgttaacaggcgtttccaaggccaacaagccttcacgcctggcaacatttgataattctactaatttatcgatcgttgcgcggtaatcatacttttttgcttgaaataatactttgaaaattcctggtaaacgtttgatgtcagccagcggatatgtattgatcagcgctacaatgatccccccaaaaataatcatcatggcctcggggctaaataacatggctaagctagcaccttttaaaatcatcgctgccaccacgatgaccaacgcggcacagataccgatcagtaaaaacaggtccattttttctcctcctcttcactcttccattttatttatcggacaaaattgaaaagatttaaggaaactcattaaaaaaatttccaaaaaaataaaacgactacagaattaacaagcctgtagtcgtttcaactaaatattttgtttttggctaacttcattccaagtttccaataattcttctaacaatttaacaatgggcggcagcttttccttgtctttgctgacattagcggccactaattgttgcgtgataaagttatataaacgatttaagtctgtcgtaatttgactatcaaccgaatgatctaatgaaaatttcagctcatcaacaatgtcttgagctctaagcaattcatgatttgcctttaccatatcattttgattcaatgcaatttcagctaacttgattgctttgatgcccccagagatcaataaactgatcagcttgttaggcgaagcggtcaacacttgattcttcaaataaaaattacgttgcttttgtgcctgttttacatccatttattcaattcccccgccatcaatttaactattttgtaattccagcttgaagtcacggatcaatattctaattcgatcatcgtcccatcggtaattttttggtggtaagtcccacccctggaagacttttgacgatctaaactctttaattgctgcaacacttttttcttctctttcgccgttacttgcatcagactctgatattcagacattacttgttgtaaaaccactttttgctgcgctgacaagtttgactcagtttcctgcaattgagtcaataattgatcattggcttgtagtaaagctagaatggaagcagttgtttggtcccagtctttcatattttgctttaacttcgttaatatttgttcaacttctcgtttttccaaacttctgctcctcttttatgatcgttattattgttgatctacacccaactggctttgcatgtattgcatttgtgaatcagcttgcatcatgatcgagtctaactgggtaaactgtgcaatatattgttcccgtttatcggccaaacgcgcggtgaagtcatcgatctgcgagttcaagtctttgaccatcttatcaatgctatcgcttttattagtaatgattccctttttagtagcatcgttgctaataaattcattgactagattatttaatttagcagtatagcccgtgtccgtactttcgtcgaagctgtcctcaccttgaacatagaaaaagtcatggactttttccggtgaatcagctaactgtgacttaaacttgtcttcatcaaggctcaaaacaccatccttgtcaacggaaaagcccatatcaaaaggactcagactagcgccattgtctttatcggcttgtgtgatcatatttctcaaagatgactgtagccgttgcaaggtcgaatcgccaaccagcttaccttgaacattagtcgaagaactttccgctgtggaagctgacgggttgcccacatccaagttacttttgatcaaactcattaagttattgtattgtgttacaaaatcagtagcggccttgactgttttagaatcatcattcttcaaggataaagtgacggcatcttcaggcttgatctcttttttcaaggtgaccgtcgcaccatcgatcgcatcagagatcacgttactatcactttccatgtcaatgccgtctaggctatacttggcagcctgacccagatcagcggaagtatttaagcccaaggcagctaaagtagctgtattctttgtttgatccagtgttgtttctttagcacctgatttgttattcgtcaaaactaggcgtttgttgatcactaccgccgaaacaccaatattttttgattctttattgatcttatcagcaatatcgagtagtgaatccttctctgtaatatcaatatcaacagtttctgggctatcgtcagttttttctccttgataagcaaaagtcagtttaccgttcaagttaagatcagtgctattcgtctctgctgcgctgacctggctaccagtcaacttagtttgcttagctaattgactgaccaaaagttcaaaatcaccgccatttttggcgtcggaatttcctgagatcgttgcaagatcttcattcgagcttttagcaattttagaataataactgtcattattctgcaaggctttaagcttagtttgaaaattacttaaagctgatgaaatttcactccaggcagacttttcctggttatatttcgtaactttattttgtaacagcgttttaccgccagattcagcctcaatcaactgatcaacaacatccgttgtgatcccagagtactggcccaaaaagctgagccctgcattgggtgctgaggtagcacttgtaatatcagccatttacgtcactatcctttcttatcgaccgtaattcccatctgatcccagatttttcccaaaacatcaagcattttatgagaagggatctcctttaacactttgccgctttgcatatccaccatttcaacgtactgccgtccagtccgctgatgaatttcgaatttcagtttaaaatcgcgacccagtaactttttattcaatgtatcaactgctttttgcagttcttgcgggtctacgactacattatcggctgaatcctcaacttctttaacgtttttaccatcatttaactgaaaaagtttacccaaatatttttcctgatctttacgaatgaatgattcatccattaatgaagtatccatttcataactatcagtcgcaactttctggattttattaacagccggcgtgggttcgactggtggaatattattgatctgcatgttacctgtcccttctttccgtgtcttacatatattcactccaatatttctagttaaattctcttttgatttagtcaggctgcgcgggtcaacttctttcggcttatctaagcaacagacttcgatgataagaacgtttcgaaatcagctgttccgacaatgcttggaagtccccgatatgccttcaccttgtttttagtcaggttacgaaatgcaaaagcttgcgcttaactaacttcaacaacaagtcgctaaagacatgacttattgttaaagtcccttaatgctcggcttcataccgcattttctccaccttgtttttcttagtcaggttacgtgagacagaaagctctgcctatccaaccttagcttcacatcgcaaaatacgtgatttgaagctaaggtccgatagtgctcactttctcccgtctcactccaccttgttattaaaaaaaccgaccgccgaataaacgacgatcggcctgtgccaataatattttattagccctgaagtaatgacaagacactgtttggcattgcgttagcctgtgccaacattgatgttgcggcttgtgaaagaatattggacttcgtaaagttcatcatttcttctgccatatcaacgtcttcgatccgtgagttagcttcagaaagattttctgttgttgttcccaggttgttaattgtatggttcaaaccgttttgtacggcccccagatcagcacgctgtcctgaaactttttcaatagcagcctgaatgtgagcaattgagtcccttgcactatcagcagtattcaagtcaacatctttagcagggactcctgctcccgtattttttggatcagtagtaccaggttctgtcgcaagagtcgaagtaccactaacacctaatgttttagcatccatactcccaattttgacttcagcagtttgttctttacttgcaccaacttggaaagtaaatttatcattagacccatctaacaatttcttagtattaaattctgtgtttttagagatatcatcaatgttcttttgcaaagcagtaacttctttagtgattttaccacgatcgtcgttagtcaaagtatcgttggaagcttgcactgccaaatcattcatccggctcaagatactatgagtttcactcaaagctccttcagctgtttgaatcaatgaaataccatcttgggcattacgtttagcttgcttcaagccaccaatctgagccttcattttttctgaaatagccaaacctgcagcatcgtcgccagctttgttgatccgtttgccagatgaaagttttgccaaagaatcactctttgaagcattggcagcagtcaagcgtgagtatgtgtttaatgccggtacgttagtgttaattctcattgtttgttcctccaaatattttgtattttgttgcttacaaatatatatatcggaccagttttaaattgtttaagtcattttagaaattttttccgaaaaaaagagccccatcttttgtgatgtgaccccgttcttgttatgaaatcaatttaataccagtgattcttgacccaatgtttctgtgcgttagtccagctgccgtatctttgttggacatattgagccgcaactttttcttgattggcaggtgaaaaatcaccatgcaaataattttgatccagctgatatttgccaatatagcgtccatttcgagcattatagttattgctcgactcatgctgaataatataatcacgtgcacttttttctgccccagccaatgttggctctaaactgttgctagaactggcagaagcgttctcatcaaggtcaacattcgctagtgacgctactgttccagcatcattgaccatagaggtcggttgcgcagccgcacttatttgtgctcttccaggaatagttaagttctgtccggctagaataaaatccggatcgtttaactggttagcctgagcaacagcttgtgtagtggtgtgatatttctctgccaactcagagacagtatcgccctttttgattttgatcgtttgttgtgctgtttctaaagcattcgaaaactcagctgcttgctgcgaattagtcgcctgtgttgcggcttgcatcgacccattattatgaacttgcaggtcattattaactaaattcatttttaaaacccgtttccttctttaattactatcacgattcctaattatatagtgttttaaaatattttacagtatctttttaatatcgatcgaattaatttgcttttcccagcaattatattgaatcgcaaacaccgtatcaggttatgctgacaaatctgtccaaaaattcggattaaatttgcaatctaccttatgaataaaataaaaggctagtcactaaccaaaaattggtcagtaactaggcttttattaattagtatgttttagaaatataagttcagtttaattgcgcaacgggggtttaaaaacgtctatataaaaatcccccgggttactaacacgaggaataagttactttaacggtaactgtttaaaaatttattttaaaagaggcaaactcatcaagctataggtttgaatgcttatcaatatcaacattataaagctgataggaaggcatcattaaatgctgggatatcctttggttcgcgactggtaattagattaccatcgatcacaacagctttgtcttcaatgcgtgcaccggcataatacaaatcaggttgtacagttaaatatgctgtcattgtacgaccttgcactaacccggtttgaatcattaattgtggaccgtggcaaatacttgctgttaacttattagttgccaaaaagaacttggtaaattcgacaaaccgttggtctgcacgtaattgatctggtgaaaatcctcctgggatgaacaatgcatcaaagtcttgaggactcacttcatcaatggatttatcaatgttaatctgagtaccatgcttaccttcaacagtgcctttttcaaagctgatcgttgtcactttgtgtcctgcagacttaagagcctctacaggttcagtatattcaacgtcttcgactagattagtcaccaaaactgcaactgattttgccataataaaattcctcctttttatgattattcatcgcgttttttatatttagagctagttatttgctagacccactattttttttaagacatacctggtttcaataccactttaatgttattatctgcttttttgtcaaaaatatcgtatgcttcagcagcacgctccaaaggcattgtatgtgtaatgatatccgatgggtcgaactcccctttttcaatcatgtcatagattttcggcatcaagtggataaccggagcttgtcccattttaatattcacattacgagtgaagaaatcttggaacgggaaattcgttgctggagtcatataaaccccagttaccatcaacgtcccaaatttcttcacagcttcacttgctgtttgtattggtgagtaagaaccgctttgcggcgtaagaatatctttagttttttctttgattggcgttacaccatccattcctacacaatcaattactacctcagcaccacccttagtcatttcatataattcactaccaactttagaaacatctgaaaaattcacgatctctacgccgttcatttttttcgcatgctgcaaacgatgatcgacgttatctacggcaattacacgtttagcacctttcattttggcaaatttttgtacaaataatccgatagggccagaacccaatacgattactgtatctcctggtttcataccactatgttctacactccaatatgctgttggcagtacatctgataggaataataccttctcatctggtagatcactatcaggaacaacaaaagaagtaaaatccgcaaatgggacacgtaagtattcagcttgacctccaggataatttccttccattttaccaaaaccgaacaacccgccttgatcaaacattggattagggttggaattgtcacattgactttccatatgattagcacagaaatgacactctccacaaccaatgttgaaagggataacgactcggtcgccttttttcactttcgttactgcagaaccaacttcttctacaatgcccataggctcatgccctaccacatagtcttcttccatgaccggtttcccgttatggtataaatgcaagtcagaaccgcaaatagctgttgctgtgatgcgaacaatcatgtcggttggttcttcaatcgtaggatccgggaccgttttgacttccattttttcgtttccttgccatgttactgcgcgcataaaatcactcctttttgtaaaagcgatatcttcagattatgaagacagcttatcatcctgttttatataagtcaaaagttaaaactttaggactaatcggttatggccatattgcgcaaaaagttgctaaaataggacacgctttttctatgaaagttattttctataatcatcgtcctaaaaaggttcctgaatcatggattcagcaggtttcatttgatgaactattaaggcaatctgatgtgcttagtctgcatgtgatccaaacaccagaaacaattgatttaattaataatgatacgattgccaaaatgaaaaacggggttattatattgaatacggcccgaggcaaattggctaatgaagcggacatcaagaatgccttgaatgaaggcaaaatttatgcctacgccactgatgttgttaaaggggagcccattgctagtgatagcccattattacaggccaaaaattgttatattaccccacatattgcttgggcaccatatgaaacaagagaacggttattgcatataactgttgataatataaaagcatatttatcaggtgatttgaaaaacgttatcaattaatggtaatggtctgtgaatttttttgcctgcattgaagtaaaattggctaaaggctaaaataaaacaaatagggcaaaacagagccagcaaataaagcgttaagaaaaatacggagagctagaaatttatagcttctccgtatttttaaaggacacattgtgaatttcttgtagtgggataaaccgatcagcgtcaatcacaaaagaaagcatccccacatccattgcatcaaataaccacgctagtcccgtaaccgttactagttttcttgttgagttcatccaaagtcctcctaataaatttttcaaagtgtcaagacaccccctggtacatgcttattgttttacctttttagaggtgtcttgtcaatgtaaattttcagataaaataaaggaaccgaaacaaaatgtgatttttgatacggttcctttgtttatatctttaacatgcaaattgcaaattagtacgtttttgcttttttatggtaagcaaatctttctctccaacttaaccgttttctttcttatctggtaaagctaaccattttgaagtgtcagaccgcttttagcatcaaacagataaatattagaattacgaatataaagatctaattttttgtggctatcatcattaggaattcttttaggcgtttgagtcacaatattaacaccatctttagtttttagatagacaagcgtatggccgcccatgtattcagccagatttttacttgcagaaagtacaaaaaatccctctttttgtgcagaattttcaggagctgtatcattatctcctgacttttttacctgcgttactttctcaggccgaaagccaagtacaatctctcttttatccgttggcaaaacttcttttttcacgaattcactaaggtcataatttacaccacctgaattaaaaattcccttgttcgaaagagtaccctttaaaatattcatgctgggagaaccgataaaacgagcaacgaagaggttacgcgggttatcataaagttcttcaggtttaccatactgctgtaccactccgtctcgcatgatcaagattttatccgccattgccatcgcctcagcttgatcatgcgttacataaatcgttacagttccaagctgcttatgtagctcgataatatcctgcctcgttgaaacacgtaacttcgcatctaaattagaaagcggctcgtccattaaaaagacttcaggtgcgcgcaccattgcacgccctaaagcaactctttgtcgctgcccaccagaaagctgcgcgggtttacgagccaaatagtctgtgagattaagcttttgtgctgcttccttgacccgtgaatcaatttcacttttagaaaatttactaagttttaagttgaacgccatgttattgtaaacagtcatatgtggatataatgcataatcttgaaaaaccattgcaatgctgcgcttttgcggtggaatattatcgaagcgctttccatctacattaatttttccccttgtaacttcttccaaacctgaaaagcaacgcaatagtgtagacttaccacaacctgatggtccaataattgcaacaaattccttgtcatcaatctcaagattgatatcctttagggtatcatttcccgcattatcataacgcttataaaggtgttcgatttgaatcttactcataagaaacgcctcctcgagtttattctttgcttttgtttctgcagtgattcataataaaaacataaaatttaggtaagaaagaatggtgctcttgacaaacaattgacaatgaatcggggcggaagacatgaaaaaaagattttttaaaatcgctaagctaacttttatgttgagtttatcattaattgtcttaacatgttgtagttttagctcgcaaaaggaaaaaaattcaaaaattacacttaacttttttaatcaaaagcctgaaataaccgcacaatatcaaaaattagcgcggatgtatcatgctaaacatcccaacgtcaatatccaaattactacttcaggtcaaggcggtggggccgctgctttacaagcgaagtttgcctctggggaagctccagatattattatgcttggcgggctacctgaaatagatcggtataaggatcatttgattaatctaaaagatcttaaggcaagtaaaaacatagtaccaaatcttgttagcggtggaatttcaaataaacgtatggttggaattccagtcaatcttgaggcttatggctggtcgtataacaaagctgtgttcgctaaggctgggattggtgcctcaaagatcaataactattctgaatttttgaaagcggttgaaaaactcaattcagaaaaaaagaagattggaatcgatgccgttttcggctttaacggagctgataccaattcaattgcttctgtttcagcacaatttacttctctgccgtacaacaataatcttgtcaaagctttcaaaagcaaaactttcccttggaaatacgagaggcaaatgaaaaattattatgatctcgtaaaaaaatataatgtacaaccgattctttcagttaaatatgatccttctgtccaagacctttttttcaatggtaaagttgctatgatacctcaaggaaattggattattccgacgcttgatggtctggaaaagggatacgtgcaaaaaaatcttggcatgttaccgttctttgttaaaaatgatggtactgaccgtcttttaaccggttcctcatggtatttaggaatcactaaagatcatcccaagcggcaaaaagctgctaaagattttattaactggatgtatacttcaaaagaagctgagaacgtaatcattaacgaaatgcgtttcgttcctgcaactaaaaactttgatgtttcgaggctgcctgatgatctttctaaacaaatttatcggatcggcacttccaaaaacgcacaatctcctgttcacaaacagtacccgaatggctttactaaccaagcacttgggccatatatacagcgctattttgtaaatgggatctcttggaaagaattgaaaaaggaaacatcggctaaatatcgacagctcagggaaatccaaagtggggagtgataaaaatgcttatcaaaaaacatcaatatctggcttttgttttaccagcagttttctttatactattgattattgtcgtaccatttctgataggaatttattattcctttaccgattccaatggtttacgctcttcttttattggttggaaaaactttgaagtcctttttcaagactccacctttctgcagagtttttggctaacagttaaattttcttttgtttcagtaattctaattaacttagtcggtttggcttttgcgttaatcgtcaccagtcacaacaacagactcacaaaatcactcagaaccatcttcttcatgccaaatctgatcggcggaatactacttggttttatctggcaattcatttttacttctgcttttcaggcaattgccgctgcttttcatcttgactttttcaaaggttggttgagcaacccttcaacaggcttttgggggatagtaattctgtttgtttggcagatgagcggttatattatgttaatctatatttctttcttgaatgcaattcctaagaataccattcaagcagctgttctagacggtgcaaaagcaacccagattttctttttcatcaagctgccacaattggcgccagcctttacaatcagtctatttctaacacttgccaactcgtttaaactctatgagcaaaacttagcacttacaaatggtggcccataccgctccacagagatgatttcgatgtatatttataatactgcttttgtaaacttccagcagggatacgctcaggcagccggaattatccttttcctttgtgtaaccattgtttcctttattcaattagcactttcaagaaagcgggagggatagaagatgaaaaaatcaactaaaatcttacttggctttctttttggaatcattgccctattctggttctacccctttatcattgttattatcaatgctttaaagggaaaaaggggaatttttcaaaacccgttatggtttacacgggactttacgttttcaaatttcaaaactgcttaccaggcgcttgattttacaagcagtttctttaactctttagttatcacagtagccagtgtcattgtaatcacattggtttcggcagctgctgcctatgctctttctcgtgttaaagggcctttcagttcaattctctactatctttgtgccggcactatgctgatcccttttcagtcaattatgatcccgcttctttcactttttggcaaagttaatttccttaacagaacgagtctggtcattatgaacaccgggttatcagtaagcctctcaattattcttttttatggggcttttcaaggagtctcaaaaactcttgacgaagctgctgctttagatggagcctatccttttaaaacctttgtttatattatctttccagcgatcagcccaatgacaggtacagttgttatcttgaatgcaatgaaaatatggaatgactacctgttaccatcactagtcgttaataaagatggcatgtacacgattccacttaagatgtattctttcttcggtgaaacaaacagccaatggcaattagccttagccggacttgttttgtcaatggttccgattattattctgttcctcctattgcaaaagcaagtcatgacaagtgtgacagaaggagctatcaagtaaagattggatttaatctaaataaaaatagtacaagagaccaggtcaatctgacctggtctcttgtactatttttgtaatgttcatattattcagcagttggatcctctggacttaattactcataattaaactcagactatgtgcataatttaccattaataccttcctgttaacctttgcgcttgttatttataatcaacatcttacgatcaaatcagtaaaaataatttgtatttgcggacttgtctcgactaaaaattctgggcgcctttgaagaaccaacacttgctgagaatcaattgattttaatgcttcaataaccccattttttacggctgcagtaacttttaagcattcgcccacattttttgctgcttgattttaaggagaccttggaccactactttgacttgcacggacattatcctgatgaagtactagcggacacattatatcgtaatcgagagaacctgaagctatgcaaagacttaggtatccgcatctgtggtcccaaattggggcgtcatccgaaacacgttaacactgaacaacgccgaaaagatactgacgccgagaatcgacgaggtgccatagagcgccggtttgcctttatgaagggttcactggggcttgatttggtgaacactcgaaccgctgaatcgttggccgtaaagatcgatgaggcaatcgtcctgagcaatgtgttggccctgatgcgggtttttgctataccaatttttgttttggcagaatcagaaggagtaacctatcaaattcgctataaatttactacgaaagttgaaaatatggtggcctaattaaacagccactagttacttgacgccaaatgcggtgtgatcgaaagcgtgagctagaagccgtgaatgataaacttttaccaaatgattaatgttgtgcgcttttcttgtataatgaggagtaaactattcagattgaatgcaatcagctttaggaagaggaattttaatggtttcgagaaaacgcgctttaatccaaaatgccgctacggctttggtgagccaattgattatgatggtcgggcagtttgcgacccaaacaatttttgtgaaaaccttaggcgctcagtatttgggtgcgaatgggttatttagtaacttgatccagtttctctctttcgcagaactcgggatcggtgccgctttttcatatgcattgtataaacctttagctgatcacaatcaagccgcgaccactgccattatggacttgttccgtaaagtgtataacaccattggcttggtgattttagctgctggatcagtgctaacctttttcgtcccttggtttgtggccaaagggtcaagtattgatcatattcgttggtatttcttcttatacttattgagtaccgtggtgagttatttctttacgtataaccggtcattgctgattgccgatcaaaagagctatgttgatgccaccaatcagctgatttggtcgacattgaagtatgttttccaaatcggcttcctgttgctatttcatagttatttcggctatttgatcgtgttaattgcgacgaatattttgtcgaacgtcttcatcacgatgcgctcgcgccatttctatccatatctcaaagaaaaaagcgatgtcgaaattgatccatccatcgtgaataacatcaaaaagaatgttgttggcacggtctccgctaaaattggctcgattgtggtaacaggtaccgataacattttaatctctaaatttatcggcttagccgtcgttggcctgtattcaaattatgcgctgattttgaccagtatcacgcgtttattgacgcaagtgtttgccgccgtgattgccagttttgggaatttaggtgccactgaaggcaacaacaaagataaacaagttgatttatttaatcagtttacgttctataatgcgttttcggttttctttatcggtttggtttcatttgcagcttttccgccatttattaaattgtgggtgggttcgcattatcaactggcagagtcaacagtctggtttattgtcatcaactttgtgtttggtcaatttcgaccggcacttaatatgatcaacgcttatggtttattttggggttatcgcgtgaaatcaattgttgaggcggttgtgaactttggtctcagtttgctactggtgaaatttactagcttaggcattaatggcgtgttgcttgggacgattattggcaatatcctggtcaactcttggtgggatccttggattttattttcaggtgcttaccaacgttcgatgctgggtttttatgcgaaatactggatttacatggccgcttttggggcattgcttgtgattgaaagcttcatcatcaagctggtggcaatcaatcctgtaggtttattgccagtaatgggctacatgatcgttgtagctttgatcgtaggaattgtgttactgggcgtgtttgcgaaaacgcgtggtgaacgagaaatgtttcgattgctcaagaatattgtgcatcgttgagagaacttctttaaatatttggcaaagtcagcaaattactagttttcccatttttgaaacccagtagtttgtgataatctaatactgtatgttttggttcagcgacactggaagctgagacttaaaaccagggaggatttcttagaaatgaaaggtattatcctagcaggtgggtccgggacccgattgtatccaatcactcgggcgatctcaaagcaactgatcccgatttacgacaagccgatgatctattacccaatgtccacgttgatgttggcggggatcaaagatatcatgttgatttcaacgcccaaggacttgccacggtttgaagaattgtttggcgatgggcatgacctcggcttgagcttagaatacaaagttcaagaacatcctaatggcttggcggaagcgttcattttagctgccgactttatcggggatgattcggtttgcttgatcttaggcgacaacgtcttttacggcggcggcttgtccaagatgttgcagcgagccgcttcgaagccggttggcgccacggtatttggttatcacgtcaatgatccagaacgcttcggggtggtggactttgacgaaaacatgcatgccaagtccatcattgaaaagcctgaacaccctgcctctaattacgccgtgactggtttgtatttctacgataacgatgtcgttgaaatcgccaaaaacatcaaaccttctgcgcgtggggaactggaaatcaccgatatcaatcaagaatacttacgtcgtgggcaactcgatgttgagctgatgggtcggggatttgcttggcttgatactgggacgcatgaatccttacaaaccgcgtctgcgtttatcgcatcgatccaacaccggcagaacttgcagatttcttgtcttgaagaaatcgcctaccggatgggttacatcgacattcaacaagttgaaaagctcgcccaaccgttgaagaagacggaatacgggcaatacttattacaattagtccaaaacgaaaccaaataatcactgatacaactcagctcaatatggaggccaaatagctatggcattaaagatcattcccaccaagttacaagacgttaagttaattgaaaccgatgtgttcggcgacaaccgtggcttcttcacggaaacctacactcgtgaaaaattcgttgaagcaggcatcaccaatgacttcaaccaagataaccaatccttgtccgctgaagccggcgtcttgcggggcttgcactaccaatacggcaaagatgcgcaaacgaaattagttcgcgtggtcactggtgtcgttgaagatgtcttagttgatatccgtaaaggctcgccaacatatggccaatgggaaggctacattttatctgaattcaaccaccgtcaattgttggtcccaaagggctttgctcatggtttcatcacgttgactaataacgtcaacttctgctacaaggttgaaggctactatgcgccagacgctgaccgtgggatcgcttttgatgatccagatcttggcattgactggccaatgagcacggatcatttgatcatgtctgaaaaagatttgcaccacccacaactcaaagacgctgataacaactttgtttacggggagatctaatcatgaaaattatggtaactggcggtgccggcttcatcggctccaacttcgttcattatgtgtataataatcatccagatgtccaaattgttgtgctcgacaagctgacttatgctggcaatcgcgccaaccttgaaagtatcttaggtgatcgtgtgcaattggtcgttggtgatatttgcgatgctgaattagttgacaagttaatggctgacgtcgatgcttgtgtgcactatgccgcagaatcacataacgacaacgccttgatcgatccatcaccattcttgcattcaaacgtgatcggcacttacaccttgcttgaagctgcccgtaaatacgacgtccgcttccatcatgtctccaccgatgaagtgtatggtgatctgccattgcgcgaagacttaccagggcatggcgaaggcgaaggggagaaattcaccacggaatcgcgctacaacccatcctctccatattcttcgactaaagcggcctcggacatgttagtccatggctggactcggtcgtttggtgttcgtgcgactatctctaactgctccaacaactatggcccatatcaatacattgaaaagttcattccacgccaaattactaatattttggctggcatcaagccgaagttgtatgggactggtaagaatgttcgtgactggattcacaccgaagaccactcttctgcggtttggactattctgactaaaggcaagattggcgaaacatatttgatcggcgccgatggcgaacaagacaacaagactgttttggaaatgatcttaaaagacatgggtaaagacccatctgactacgaacaagttaaggatcgtcctggccatgacttgcgttacgccattgactccacgaagttgcgcaccgaacttggttgggcacccaagtacactgattttgattctggtttgaagcacaccatccaatggtacaccgataatcaagactggtggcaagctgaaaaggctgaagtcgaagccaagtacgctaagaacggccaataatctttgcggtcatggtcgtcattgcagaaagcgaagcgctcggcttcgctttttcgttgaaggagaataaaataaatgaaaattttgatcactggtgccaacggtcaactcggcacggaattacgtcacttactggatcgtcgcggccttgaataccgtgccactgatgccaaagaactggatatcaccgatgctgatgcagtgaatgcttacgtcaaagacttccaaccagacgtcatctatcactgcgctgcctacactgccgtggataaggcggaagacgaaggcaaagccatcaaccaaaaagttaacgtcgatgggacgaagaacttggcagttgcggctggcgagaatgatgctactttggtttacatctcaacagattacgtttttgatggcgattccgatgaattgtatactgttgaccacaaaccagccccacgcaacgaatatggtcgtaccaagtatgaaggcgaactcgccgtacaaaagtatgccaagaagtattacatcatccggaccagctgggtctttggtgaatacgggcataacttcgtctacaccatgttagatctcgccaagacgcatgacacgttgactgtggttaacgatcaatacggccgcccttcatggacgaagaccttggctgaattcatgaccttcgccatcgatcaaaagctcgaatatggcatctaccacttgtctgaagacaactcatgtaactggtatgaattcgccactgagatcttgaaagacaccaacacgaaggtcttaccggtcacttctgccgaatacccacaaaaggcatggcggccacgtcattcgatcttagatttgtctaagaccaaagcaactggctttgaattgccgacttggcaagatgccttgcatgaatttatggcggaaatcaaacagaagtagtgtaagtttgtagcacttatggtgacttcaaagtgtgtgtgacgaagtccatatgtttcgtaagaacatcaatgaataaaggatttaaaacaaaccaggtttaatttgtacttgagctgagcgggggttggaccctgctcttttttgaaatgggggaaaaatatcatggtaaaggttcgcaaagcaattattccagcggcgggtttaggtacccggttcttaccagcgacgaaggccttagcgaaggaaatgttgccaatagtcgacaagctgaagacggcatatagctttaccaggtaatgcgaagtttttgacaccactcggcgaaaaaattgtccaaggtcggcgaagaaattgaccaacaatacagaaacctcctgtatactatgggtagcatacgtgtaagcgcgtgcaattcttaaatacaggaggtctttgtaatggctattcattaccgtcaaattcttgagcttcacgctcaagagctggtgcagcgagacattgcggcaatcactgggaattcacgtcccaagatttctgaagttatcaagcaagctgagctacatcagattagtccaccatttactgatgatgtggatgatatttggttggaaagcttgttgtttcctcagaagcaaccgatggcaaaaggtcggcagatacccgacttcgaaaagatacacgaggaattggctaagcctaacgtcaccttatccctggttcattatgaatatgagcaagagtgccgacaaaatggcacaattccgtatgcgtatcgaaccttttgccagtattatcgtgcttatgcgcagaaatataaggcaactatgcggatccggcgtaaaccaggtgaagtgatggaggtcgattgggcgggctcacctttgcatatcgtcgatcgcgaaactggagaaatcatcaaggcatatctgttcatcgcttctttgccgtgtagtgcgtacagctactgtgaggcatttatgactgaacaacaggaggcgtggcttactggacacattcatgcgtatgaattctttggtggtgtgacgcaatatctgatttccgacaatctcaaaacgggtgtgacttcgcacaagcatagcgaaatcatcttgaatgaaatgtatcgagatctagccttgcactacggcacaattgtgatgccagcacgagtccggaagccaaaggataagccgactgtcgaaggtgttgtggggacagtatcaacatggattatagcagcgctacgaaatgaaacattctttggcctcgaggaattaaataaggccgttcgcatcaaactcaaggagttcaacgaacggccattcacaaagaaatataaacaaggtagtcgcctttcggcgtttcatgacgaagaaagctttgccttgcgaccattacctgttcaagcttatacgatggccagttggcggactgccatcgtgcaattagactaccacatcaacgtggaaagtcagttttactctgttccttacgagtatatctcatctaaagtggatatcaaggtgacgaaagatatcgtagaagttttcccccagtttacaattcaagtgcaacaccctgacgactagaccaaaaaggccatgaagacctattcttgttagtactagctaaacaagaaagcaggaatcttcatgacccactctcagactaacacccacaagcattaccaacaactcagttttagcgaccgtgctacaattcaggcccttcgggctgtgtttaaaacggaatatcttcgtttaggtcaattacatattgagataacagtttaattacttcaattttactcttagttttatgttgctttatcaaatttgaaaagagttcatcacgtaaaatcataaagccctgattagcatattccgaaagcatctctttaacttgtttttgaactttattatcagcaaattttccttcttcaccatccaatataccttctttgatagcaagtgcatattgaatcccaagatcagatttattcttaaaatatgattgtctgaactgtcgaccattaccatcagaagccggtaactttatacctgacttcataccaatagttagaccaagcataaagatctgtgaaatctttaagtctaaactatcatgcagtaaatcaaaaacgtcttcaaactctttgggtgtatgaatcaaatcatcgacatttaagaaatttaaattttccattacctatacctcctttaattcactaaatgaatcaattgcacgaatcacacttttgccatcttgatctttggtgatacggtaaattttactaactttatcttcactagcaaataaattcatttcattttcacctaattcagtatctgtcaataacaatatccattgccgcgcaaatttaggagtctctctaatcatatttgtccgaacaatactatctaggcgtgcaaacggtgtatctactaaaagtggaaaatcaatgtcagatcgtcctcgagaagacaaatctgctaatgcaaaaataaaagacaatgacagtgcttgcttttgccccatcgaaagatcacctaacacattaacatcatcatcatttaacaacgtaagatcatatgttgttgaaatatctaatttctgcaccaagttacggtctatattagaaagcagtttcttaagcatatcaaggattctttctgataattcggttcgcatattagaatcataagcatgtaaaatacgtgttaaaccatctaaaattctttccgttctcttaaatactttttcctttaacatatcttcattaacaagatctatttgtcttttctcgtctttatccaactgctcttgttcactttctaaattgttcagttggaatttaagctcattaatctgtgtatttatggcatctaatttccggttaattgttggaagactatttacttttttatcttcaacattttgaatagccgctaaatgaccagacagagattcattcattttatcgatttgcagcatcaactgttctttcttttttgacgcctcgataagcgttttatatttctcttttagtaaatcagtgacttcactattttctttaacgtgttcattcgcaatctcaatatcttggaatacatccctaatattagactgatgataattatccaataattgcttaacatgtatttcattctctggatgatcacttaagtcattaccgcataataaacagctaccctgctgcaatgacatttcaataatccttttatcaaacttactgtcattttgttcttgaataatactaactttaggcattaccaaattcatagtgtcattccataaaaaactcacgccatcaaataacagacttttcatattgtcactaatctcatcaattaatcgatcttgattaattagttcttcttcatacctatttagctgttttttttgactacttaattgttcagtattagcaatctctaactcaattgcattcttttcatctccagctaatctaagttcctgacttacttcttttaatttattattgactgtatcaatttctgccaagttggactgctttttactttgaatttgatttaattgcaaatctttagattgatgcgcaatctcatttttttgctgcttaatcagttgttttaaaatatcctctgctttttgtacactctttatctgcaatagattttgcacgctatttttaatcttttcagagacttctgccttattcgatgaatccggaaataactgggattgctctgcgtcaaaaaagaaaaagtttctaacataatcgggcatgatcatatttaattctgaattaacttcctcaacattattagagatttgctcagtttcaccgctagaggttctcttagataatgttgctcttgagctcaattccttaatattatcgccatcagcaatttcaatcttttctcgatgaatctgatacataacgccttcgtgttcaaaacaaacttcgacttctgcggtaactggatcaccatcattttcacgtaagcgatctaagttaactaaatgaacagcttcatgccggctctgattatcttgatctaatttttcgtccccaaagagaccaaacctaattgctctaaaaatacctgttttcccagcgccattgacaccaataatcaatgtaacgttttgatcattttttgcaaacgtaaccatttgaggatcataaaactgcctaaagttttttaattgtaaactagtaatttgcatagtctgactcccccgtattcaagtcttcttgaacaatttggattattttattacttatatgatcacgtatttgtttattattaatattcttgttttctatttcacttaataattgtttaatcacaacctgatctgattcaggtaggctattaatctgagtttgcaaatctgtttgtatcattaatttatttctcctcattttgaatattttcattataaatatcgattgcggatttatccatatacgaatctaaatcaaatttggataaaatcgggccaacaatatttcttgcctcaaactcatttttggcatattgacaaaattcgtgaaacctaggtatttctctcttcaccataactttagcagtatcaaagtctatttcgttaacatcgggtaatacaataaaatcatagatatttgcttgcgttttaccagctgagttccgtaaaattcttcctcgacgttgaataaattggcgaggattggtagtactggctaaaaaatacgcttgacgagtctgtggaacgtcaactccttcatccaagcacttcattgctgctaaggtttttatttcaccgagttcaaacttatttaaaatttgagttcttttttttaatctaagaccactatcaaatttcacaactgactggtttaatttatttccgattagttgggtatatttatcaatttgaccatccggacagtacaataagttatatttatcattgtttttattaaaaactttttgtaatccaatttccttatttgccgcctgctgaataacccgtgttcgcttcctgagtaaatattcatatttttctctaattgaatcatcatcattctttaagagctgaccataaattttaccaatacttttagtcaaagtgatatactcttcgttttcttctatcgttaggtatacaggaatggggtaataattatatggtgttagaaagccacgatcaattgcttgtgccaacgaaaattcatagataattccaccgaacaaattaaatattcgattagtcccttcctcatcccaccagcgttctggtgttgcagagagcccaagcacgctaccaaagctcgaatataccgagataatattaattgaacttcgagatcctaaataatggcactcatcagcaattagaaatacatcctcagtacgctttagcaatttaattaaattattaaattcccacttattggtactaacatatgaaccgataattactaatctatctcgtaatccatggttatattcccatatctgatcttgaagcttttgcatccaattagttttattacccgcaattttcacatcgacatgcacgccggttgcagtcagattctcctgccactgaggaattaaatgaataaatggtactaagataattagtacctggtgtttaaccatttgaaaattggcttctgcacaagcaatgctagtaaatgttttccccgttccggttgccatatctaaaatgccacgattgttgtgactttgaaacgcctgaattgcttttttctggtaatctcttaattcaatcatcataatttttcttcatctgaacagcaccaaactcatttacaataaagagagtgtttaagacttgtggaatactagtagcttgtgcattctgtaatatcccaattttattgagataagctaaaacgtccttaactgatcccccaccttgatactttttcatcatggctcttgttaaatccacaatgtctattatttcagattcataaggaacgataataagcgggtcattaggagtctcaagactaccattgtcaacgtcccattctagtaatcgatacttattcgaatatctgatttcattttttagtaattctttagtccacgaaagtttaaaggatcgttcaggtaaacttggtagattatttgtattgagcattatcattaccaaactgataaactcactatcaatacttttggttgaccaaatattttctatatactgattagtaccatctataacttgtctagactgttgccaattaataatatatttagttaatataaatacatccatatcgacttctgtcatatcattatttcctagcaactgattaatttttgcataaattgattgattaagatagcctactgaattgagaaaattggttaattctattcgagtaaatgtcctttccccagcccagtcatcgattattttttcatttgtaggccttgatttaacatacttaacttgagtgaatccttttagatttggccataaatatgttaataaatcggcaaaatagtctaactctgaaaagtaaacggctatccccttagtagctaatagatcattaaaaaaactagatttttccatgttatcttttatttcatgtggaaaaacatatccttcgtgtaattcaaactgtctttctatttcattatcaaaaagttgtcgaacttcttttgaaattttgatttctatcaaagatatctttttatttcgcatccctaataattttgagttacttacttcatgattcacactactcaatgggattccaatatcagaagatattttttctgctgaaactatctttccatgtttttgaacataattaataattctttgttcaatagttgctttctcagtattcggtaatctaattgactgagtgttcacatatccaaaactaaactcatcgggtagtaggaagactaattctgagtataattcaaacttatttctaatgcccgctttaattaattcatcttcaaacttcttatatacgacttctggtctaatttcttcaatatctataagtctattatttatccattgagtcattttcgttaaaagttgttggtcaattttatcatgattggaaatagcatacgtataatttcctaaatatactatttctcccttatcacacaaacgattcaatcttgaattgaacgctcgaacctcatcagtcaagttatcacgcaatatctttttatgaaatgtatgttggatataagtatttaagtaattaattgattcagtattgacctgcagagtgctatcaggttgtttgttaatacattttataatggcttgctcaattgatatctgcttataaaggaaaagactgttttcgtactgaaaatcatacgtcaacctaattttattcaataacaatttaagctcttcctcgtttagaaaaggttcgaagatggtccttatctctttaacagaaataacatcaatactagttaatttctcatcaagttttattaatgtttttctgataggttgctcatcatttaatggcggcaataaaactggtaatttcccaataatacttggtgaatcaatatcatagaggtattgataatcttcactactcatatcttgttgtaatatcaatactctgccaacaaagttagtaaaacagatatattcccgcaatcgatatcgattaccaatttcaattttttgattttttattttttgcttaagttgacgaacacgttctcttgtgacacccactttctgacctatggattcaagagtacgatattccttattattttcattatcaattttgtaaacttcattaactcgatcattattattcaagtaatactgaaaagctcgttgacattttgtttttattttatcagtcataacttcaagatagattaactcatttatgatttcctcattaccattatttgcattcttgttaaattcaattttactgtctattactgcatcacgatattcttctaattgaaatgctttaattaaattaattagttctcctcgagtaatattagtttcatgatgctgttctcttttaaaccaatctatatattccttatatccatcggatatcatttgaagaaactctttttgttttcgccctttaatatttttatcctttagtaaactaacaaactgtttattattatttggccatataattccgtctttctctgctttctggtcagaaaaaataatttttaaatattcatgctgcccaaaaagaatatatggaaaaacaacgtgagcaatttcttgctcttgttgttctatcatgatgaatgatgaaaattctgaaagtttagttcttaagtcatctatacgtttaggacctatccctttcaacgtagtaagcttaataattacgtcttcagtaatatttttaatttgaaatacattcatgccacgtaaacttttttttataaaagtaaatttgttttcacttagaaaagtatctaaattgtcatttgaatcacttgatacatcggtttctatattgttattttcaagatagtttttattatcgtaggttataatagaaaatccagcatattgaaataccttttcggcatcaaatagttcttctatgttgttgccaaaaacatacggaatagcatcgatacatataccatcaaaataactatcgctatccacatgagcctcggaaaaaaattgttttaaagcaataggaaagataatactttcatactttttattaccaaaagaacctgattttaacattcttgtttgttgtgggagttgataaaataattgttcaccatgattcccaaaaaaacgcccacctcgaattgttatttcaattttaagtaatgtaaataatgacggatttactttgtaaactcttctcagaaaatctaaatctacaatacttatatggttctgatatgtatataaaacttggtattctgtaataaacttattaattaaaaaacttctacagttctttatatcccctaaaaacaaaattttattataatacatcccattcatccaccattctcactttgaaccaatttgaagcgtttaatacttaaatataattagattatactaatgtaattagtacagatcaattagtattttgcgtagttataaatacagtaataacaatgcattcacgtattatatagccacaaaaaactgtgtatataaccacaaaaaactgtgtatatagccacaaaaaaataaaataagtggctatataatgttataataaaagcataaagaaattcccgtctaaaagtttttctttatgcttatccaacaacacacccaaaggagtgtatttatatgactattataccagaatcaaagacaaggcaggtacagaccttgaatgaattatcaaaaagaaaagtcgttgaacataatagtttaatcacatccattgccaagatggataagacaccactcaaaatgtttgaactagcggtgtttttaattgataccgacaatccacctcaggatcagacggtttatttatcaaagaaagaaatgtttgctttctttaaagtggatgacaacgataagcatagtcgttttaaagaggcaattgaaaaaatgcaaaaacaggctttttttcagattaaaaaagaacaagataaaggttttaagtttgttagcattgtgccaattccatatgtagaatggacagattatcatgatgaggtattaattcgatttagtcctgaaattatgccctatttaattaatctcaaaaccaattttacacaacatgccttgtcagaaatttccgaattgaatagtaaatatgccgttattttgtatcgttggttatcgatgaattacaaccaatacgagcactatagtgttaaaggtggacgccgagaagaacaaattgacaggtaccgtaatcctgaaattggtatgaaagagttacgagaaatgactgatacgataacagaatacaaacgattcactcactttgaaacgagagtattgaaagaacctctagcagaaatcacaaatcataccagctttaatgttatatatgaaaaagttaaaaaaggacgcagcattgataatatcgtctttcatatcactaaaaagcaggtggcagatgatattagttacaagttagatgatccaacttatattgacggtaagataaggcaagaagaaagtgaaaaagacctcgtatatgaagctatgaaaagtccatatacaaaattgctgatggaacatttcttgttgtcatatattgatttgacggatacggctattttgtcagggttacagaaaaatgtttatccactttatgacaaattaaaagagttacgtggtttaaagggcgtgaaagaacacttagcatatattcgagataaacaagatgactattctaaaaagaatattgctaagtatcttaaaaaatcgattgaacagtatctaccaatcgttaaaaggcaggatatagatcatgagtgaaaatttaaaaacaatccgagaacttgctgaagagttagatgtgtctaaacaagccattcaatatcatattaaatcactgacaaataaaagtagacaaaaaaatgatagaggaattgttgttttgtctatcgaagaacagcgatttataaggtctaaggtagacaaacaaacaaacaaaaaactatcaaaaaaacagacaaataagagacaaacagacaaacaaaaatcatgggatatcaaccaatatttattaaatgaaatcgaagaagttaaaaaaatagagacgaacaactagcagtcaaagaccgacaattagaaaatagagatttgcaaatatctcaaatgcaaaacttgttagaccaacaacagagactagcgctgcaagataaaaaattgttagaagaatacaaatctgaaatcaaagacctgaaatcattgactacacaatcaaaaccttttgtaaaagaagaagttaatgatcataatgatttagaagagagcgccactcaggaccaaaataaatctaaaaaatggtggccatttagcaaacgaggacgagaaaatgattgattcaaaaattatggagaaaacaggggccattttgaaagattttggtaatacctatttttcagataatggcactttaaagcgccacaaagtacatagaagaccttgatacttatacacctatgttgatgaaagcattgcatttaagtttatggtgtatcatggtgttatacaaattaaaattataggtagtttagaatgaaaaaaatttattttttatgtacaggaaattcttgtcgcagtcaaatggctgaaggatatgcaaaaaaaatattgccggcaaatgagtttcaaatcgagagtgcagggattgaaactcatgggttaaatctaaatgctgttaaagttatggctgaagatggagtagatattagtagccactactctaaattaattgatctaaattatttgaacacttcagatttagttattactttatgtggtgatgccaaggataaatgtcctatgcttccccctcaaaccaagagtttacactggcctttatctgacccagcgcaagccacaggaactttagaagaacaactacaagaattccgtaaggttcgtgacgaaattaaaaaattagttacaagtttgaataactacgttcattaataaaaaaacgccatatagtgccgcagtaaaacagtccaattaatttattgacttctaagtaaaataccaggagttttgctatgagttaactatgatcctaggtggtcactaaaacattccttaatttaggggctataattataaattagataatacattagaagctggagacaagattgtctagataatgtgtgagataaaatttttggcaggttatcatacataagacaaaatgtttttaaaactgataacgtatttatttcacaacaattacgcatttatttttgagaaaaatataaagcaggaggattacaatgctgaaaacttattctttaacaaaagatacattattagtttcgtcagaatcaaatatcaaaaactcttctgttgtctatgtttatggtgacgaacgagaatatatcgaatcttttgaacataaatatgactttaaaataggcaatatactaacgtttgatgatcgagttgcatatgacacgatgatagatcagaacgatgaaaaaagtttgctcgtaagttttttgtttcccgaggtacatgaaggtgggcatctagataatctgacgacatctgttgttttcttggtatttaaaaataagttgataatttttacaaaacaaaaattaaaattcattcccgaactcttatccaatatggttttacgtgatgtcaataatttcatgcaggaagtacttttaaagatcatgcaaaaagatttccatgtgatgcttaacgaccttcgtggagtcaagggaaaaattgatgatttagaatcagaaatatcaacgtccggtccactcagaccaacgtttggtgatttattgactcttcaaaaatacatgatagctttgtcaacaacctatggcgctaatcacaaagcgctggatttcattaacaaaaatttcacaactattaatgatattgattttaccaccaaaaaaataattgatgagatatacgatacaagcgacacaatggatagaattattttaggttacagccaatatttggatgatttggaagatatgataaacaatatgatttcgtatcagctaaacatgattatgaaaactctaacagagatatcaatcgttttgactattccagcgattatttttggcttttggggaatcaatgtccatgtcccgtttgaaaagtcttcttatggtgtttttgccgtattgattatctctgctatactaagtctaatttgctggtttttgctgcgacgcaaaacatatttgtaaagtatttgtgataccctaatatgatttaaagcagaatttctttgttgactttttaaaaggctgattcctttcaataatttaatagcttcagcggcttccttcacagtatgagagttagaatattcaaagatagccatattccggctatctttttttcttttgggtctaccctccttatagttgggattgtgttgccttgcaaatattttaccggcttgcgtacgctcgataatcatatcacgctccatctccgcaaccgatagcaaagttctgacaatcatacgcccaattggggtgttatctatcgttcctaaatttgtactaaaaatcaattttttaaggagctaaaactatgcaacaagttgtcttacccatcaaaggttcaaacgttctcaaagaggtgcaagataccttactcaataatttcaaagctggtcagcgtaactacacaatttttcaggttgggaaagcgacgctactaagagtcagtgacgttatgtgcctaaaacaagcagatgtctttaatccggaaggctccattaaacaaaatgcattcattcacgaccgaaaaacaggcaagcctaataccttgtaccttaaaccagttcaaacagagcttttattgtatcgtcaatggctgcttgatcataaactagaatctgaatggctctttccgtccattcaacacccagaacggcatattacggagaaacagttctataaaatcatgagcaaagtcggcgatcttttaagcattaattaccttggtacccacactatgcgcaaaactggggcttatcgcgtttatacgcaatccaattacaatattggcttagtcatgcacttattaaatcattcaagtgaagccatgactttagcttatttaggcttagaccaagccagtaccgaaactatgttagatcaaattgattttggttagttttatttggatttttagttgttgccgaaggcaacttctgagacagattttaagcacaaaacctccactaatttttagtggagtgtaagtgcgccttgaccgagccttgaccgagccttgctcggtttgcgccttgaccgagccttgctcggtttgcggacccacatagatgttctatgtgtaagtgcgcattaaactcatttcattccgtttaatgacgctaaaaaatagctaacttgatcattaaaataaaaggttttttttagttcaatgcgcacttacacgtcaactaactttgacgtgtttcgataccccaaaaattgtattagatttcgctgcgctcaaacaaatctttttaattgctttacaccgtttttctttctaaacttaatcacaatctttgaataactaactataaaaagatgcctttaatttaaacctgaagtaattagctaatgttaggagtaactcagatggacgaaaagaaagtattaaagccaattgatgaaatgcttgctgatccttggcaagttgatattcaagaattgtttgaagattctgtcaatgaacctgacgagatcaaaaagaatttgtatgattccctatatacttatattttacaaaaaagacaagaagatattattaatcgtcctgcctttgttatttagtcctctaaaagcctgttgagggctttttgtttttgctttggtataaatatatataaacagtctcaaaaccgctaaaaacgaaaaataagacccttaaaaacgaacatagccgctaaactcttgttaagattcagaaaaactaactgtttgctgtcaatggtagcggacgagcaaagcgtgggagcatagtgacttgaatttaatgtgagccgatttttgagtcgctcctttgtgttttttatttgaggtttggctctggtacagtagtacctcttttaaacctcttttagacccctatttagtcctactctcctaagggttacaggactttatcgactacattttgtctgtttatcgactacgcttatttacttctgtattcaaataaagtagtattattcaaggaggttattttatgagcaatgaattagttaaatatgatccagaactgaatacaattcctctgagaagatttactcctgtagaaatgaatcttttcttttcggttgtttctagaatgcgcgataaaggtgatgatactgttcggtttacttttgatcagttaaaagaattaagcgcgtataagccgaccgcaaataatcgatttattgatgacatacaaagtacatatcaaaaaatattaggtcttagatttggctctagaagtaaagatggacttgatagagaaatgtttgtcatgtttactcgatttgaaatcaagggttcggcagaagtcccttatgttgatattcaaatttaccccaaggcattgaaacttctaaataatcttgaaagctgggttcgatatgctttagcagagttcagagatttaaagagtagttatgcaaaaacgatgtttcgtctccttaaacaatttcgaactactggttatgcttatttttctaaaagtgatttttttgaattacttgatattccgcaaagctattggaataaacctgcaaacgttgaatccagagttattcagccaattaaagaagaactaactcctcttttcaggggtctaactattagaaaaaaatatggtaaaggccgtggcaagccggttattggttactcatttacctggaaatcagaaaaaaagaacgcagacgacttctcacaagggcaatttcaagatgaaagacaaaagcttttcaatattcagcataatagtgaactaacagaacatcaaaaatggcgcgccattgataaagttaaggggttaactttaggctcaactgagaaacaagcggtggctgagaaacaagcggaacacgataaaaaaataagagatcaagcaagaaaagaagcacttgctgaactccgaaaggggtttggaaatcatgcctaaaactattagagaacttgctgatgaattgggcgtttcaaagcaggctatatggcaaaagataaaaagagatgcgtcaatcgatttacgtcaatttacatcaacaaaaggcaatactgtttacgttgatgttgatgggcaaaaagctattaaagcaatgctctcaaacgattcgtcaacaagataccgtcaacaaaaagatgatgttgacgacaacaaaaaagatgcggttgatggacaagatgaagtgaaattccttcgaaatttagtatcagaaattcaatctgaaaagaaagagttacataagttactagatcagcaacagagattggccttacaggacaaacaactgctcgaagaatacaaggcagaaattaaggacttgaaagccttaacgatggcaccgcatgatgatggtgaaaaagaagtgacgtcagacaaacaaccggaacctgaaaatagcaccccggagtcacaacctaaacctaaaaagtggtggcgttttggtaaatagttacaactaaaaaagaaaagaagactagttaaatagcgggagataaatttgaacaagctgtagctgccaagctaaagggtgagggctgggactgtcccacagattattctggttgtttgctttttaattcgtgtgtgagtggatatttttcattcattgtcaatggccatttggatttcatgtatttcattatgaaatacttacaaaaaagtatagaatctcatcataagagaacaatatctaatttctttgctttttcgtagcgaacttgtaaacaatgtgatctaattaaatttatatattatttataagaataggagtattgaaatggctgaaatgagttttgaacgaattacgttaggtactttattttctgataataaaaatttagctgtgccaacctatcaacgtggttatgcttggacaaatcaggagtgggaagatttttggaacgatttggttgaggtcttagatgagaatgaagatgatcatttcttagggcaagttgtaactaataagcttgatagccgtgactatgtggttgatgggcagcagcgagtgacgacgtcaacaatgtttttagccgtattacgagatagttttaatagtttggattcagaacgagcccgtatgcgtgcgcaagaccttcaaaagaagtatattggtcgccgaggaaactataactttacacaatctgaacaagttgctgaattttttagtcgattgattcaaaatgacgcgttctcttttagcgaggtaaaggggcaagctggccaagacagtgagcacaattttgtgaaagcttacgattatttgtacaagcgtgtgggtgcacgaataaaggattttaatacgattgacgatagggttgaatttttagaagatttgcaggatgcatttcttgatcacatgtttgttatgaagatttcaacaccagatgaagcgagtgcatttgttatctttgaaacgttgaatgctcgtggccgtgacttgaatagttccgaccttttgaaaaaccatctattccgcaaagctagtggcgatcctgacatacagcaccattgggaagaaatgatgactccgttagatttcaattctgatcgggctacgaagttcattcgtgcatactggaatggaacacatgaattcgttactgagaagaagttgtatcgtgctttgaatcgaagtgtggagactaagagcgacgcaacgcgattggttcagaagctttcagatttgtcagatgaatttgcttctatgctagacccaaagacccaaatttcgtttcataatgaaacattgattaataacttgtatgtacttaatcagttgggagcaaagactttttatccgctgattttagttatggttgaaaaagaatttgacgaagcagaaattgcacaagttttgtataagattatttcgtttacaatcagaaactttactattgggggtctagtagcaaataagtttgaaaaatcgtttgcaacaattgcgagaaagctaagcgatggcaaaatcagtactgttaaggatattaatgatttaatttcagaagaaatggttgataatcaacaatttgagaatgccctgaaatcagcttcgcttcctactgaaaaaacaactaaatatatattgtctgagctgtcatatcctgatgatgaaagtaaaatcctcttgactgatgtaaaagtcacctatattaatgaaaatgtggagaacaaggatcgtatcggtaataaattattgataacaaagaaagaggctaagtcgtttaaagatgcttcttctagaaagcaggaagttatagctaattcaaagtttgaagatactcgaaagtgggcgggtaaagtaaatgtaatgacgtcagaagagattgacaaacgacaggcttcttgggttcgatctgctttgcttatttgggctaagtaaaaacgatacaataaatagccgatttatgacaaataggctgggacagaattattttttgatcaaaaaataatttgtgattcaaagccagttaagctgaaataatgcatatacaaaaaagccgaaggaatcgtattttaacattcgtattccttcggcttttttgtcggtgtctgatttcgtgatgctcgcttgtatcaaggttttcagccgtttttttagaaaaatcatgctttatatatacatcttttgcattaacttctccatccgcaagataaagtctgcgtttaattacagttgtatccaattagtctaaccaaaatcaatttgatctaacatggtttcccgactcgcttggtctaagccaaggtaagttaacgtcatagcttcactagaatgattcagtaagtgcatgactaagccaatgttgtaatttgactgtgtatagacacgataagcgccggttttacgcatggtatgtgtgcctagatagtttatccctaatagatcaccaacgcgtgccatgaccttataaaactgcttctcagtgatgtgacggtctgggtgggcagttgaggggaataaccaatccgaattgatgttttcttggaccagccaatcatgatatttcagcaagtcttgttgcacgggctttaaatatagtgtatttgctttaccggtctttttatcatgaataaaggccgtgtgtttaacagagccatctggattatagacatcggatttctttaacgtcatcacatcactcacccgcagcagggtggctttgccaacttgaaagatggtgtagttacgtcgacctgcccgaaaactatcgagtaaggtgtcttgcaccatttttaagacgttagagtctttgattgggaggactatttgttgcaccatagtgaatttaccacctttcaaaggtcactttattgtttgttaaattagctaatatttgtatctttttatacaatgcatctttcgaaaaattaacatagacatgatatttactggaatctatagctttagttaattttgtaccttgtcctgagacgcgctctagggttcctattatttgtacagtattgggttcagtcgaatttattaaatccgttaatttagctatatctgacgacagaacaagtgtagatactaatttaataaagacgtctcggtaagagcttcctgtataatgctgtctaccaaataaaatcgaaatagtatcgttgtttggagtagggtccaccctatcaaattcggtatcatcactagcaaataagttaatatttgcgatatctatcaatacccgttcaactttcgataacaatgataaggcagaaaattggcttaatttatcaatatagctctgattaccttgggtattattatctagttcgatttctgctcgtttcattttttcaattattttgcgttctagcagatctaactgtgcttttgataaatggccatcttcacggccaaaaaatattaatttattccaccaaggcttattaatataatgttgctgcaaccgattaaaaatagcatttgatgcttgacctatatatcgtttatcagcacctaacaatatatagataccaggttttttagactcatcaatcaactgaatgctagttagatcatctttattcgcaatgaccacaaatgatggttcgtcatagaatattgaaatattatcattcccggactctcgattgataaatatgtgattgggcatgtgatcatcgacctcgttttttaagtactattatatcacctaacaaaaaaacaacccccattatctaaccggtagataatgggggctgttttaataggttttcacaggggcgatttatataattatagaccctatacaaacatattttgtaaaaagccttttttctgttctttcaacaaatctaacttacgttgatgaagagtgatagtgttgtctaactgtttgaaaaataacccaattttttgttgacgacttttgtctcgcactcttcattatttatcacgatgataaaaatcttttgtattaaagaagtcatttagaaccgtgttctcaccagtcattgtttcatgtaaacgaataccatcgacatttatccgcgcattacgataataatcatttgttaattgaccccatgatgtctgtgacgcatcaacattatcgaaaatactgaaaccgctactcttaagataagtatactttgcattatcatttgtataatttgtaaatgagccaatatctgctccaaatgggaaaatcaatactggtgttttaccaacaattggttgtacttccttttgccaaagtgcagtgtcctttttgatatcatcaacactggccgtagtcatatttatatgaccccaggaatgcgatgcaaactgccaaccttcctttttcatagcgttagcaacctttgtcgctttcttagcttcgcgatgtgtcttttttgtatcaccatattgactctttgatgaacgataacctagcgccccattataacccgtttcagcaatcacaccctttgagccaccgtatgagaaatctggatgctttttgatgaaggtatcaacaatcggtaccatgtcataatcaccaattttcttctgaccattattggtatattgatttttaacatcaccttgcttattgacgactaatttatctgcaaatccagaattcttcatatactcataatagttaacatcatcctgtgatataattaaaggcttcttgccttcaggtaatttgactggtttgaaagtcaccttcccttgtttatcaatcgaaatgatatctttaaagttaattaatacatagccattatcatataactgattcagcatcggcataaattcgtcgatggtcaccatataatctttgtatccctgtgcctgcttagatgagaaagctttaccaggatcaacaattagtgaatgataaaaaagatgtgaaatttttgtcggatcatcccacgtgaccaactttgactgttgcttattaatactcttttttagatgatcaactgttgttcctttgtgccccgataacactgattttgcttctttatattggtactgttgacttaatgattttgcctgctttactgtcttagttgtttgactatcagtttctgcagccataacatcatcatcaatattgccatataaccctaagcctgcccccaaaatcaacccaatgacgacaagactagttatcttggtttttatcacagctattcccccataatttttatgaatattaaacgacaagttagtgccattctatatcttattacctcaaaaataaaattattcgtattgttttataaatagtaaagatatcaaaaatgcgacataatcaaacaaaaaaagagtgattaaaatcactcccaaaaaaaatatttttaatgccacaatacctatttattgcgcatcatccttaaacttattatagtaatttgctcctgggaatacccagttagcacgaccgaatatcttgattgtcgctggaataataatcagacgaaccaagaaggcatcaaatagaaccccactggctaatgaaataccaattgacttaatcgttggatcttcaaccaaggcaaaacttccaaagacagcaatcataatcaaagcggctgtaataatgactggaccactctcttgcaatcctgttttaacagcccgatttgtatctccagtggcaatgtatgtctccctaatccgtgagaccatgaacacttcgtaatccatcgccagaccgaagacaattccaatcataatgactggcaaaaatgcaataattggtgatccttcactaatatggaaaacaccatcttgcataatcaatgtcgtcaatcctaatgatgcaatcaatgataaatgctcttatactaaaaaaatggactatttttattcagtccgtaaaatgaaagtataggagtatttttatgtcaattcgttattcacaagattttaaagattcactggatcatcagctttgacgattaattgttcttgagctgtttcttttaaagtttttgctgaattcgttatactgcaattgtaagcatatttaaaaaaatagttgaaatgggagggatttatatgttggaaagaaatttaacagttattggaagttacagtacgagagaagaagctttatccgtgatcgaacaactgcaaagagaaggctatagccgtgatgatatcattatttacaccaacaaagatgcagctacaaattttggttttgctggactgtcaggaatcgatgttaaaaccggcgtaaatggcgtcgaaacgactcacgaagatcgctcactatgggaaaaaatcaaagatgcattttctgctgatacgtacgaatacgattcaagtttaaatgaagaagctgaccatgcaaacaacgacccgctttaccaatatagagatgatatctcagctggaaaaattattatcaccgtcaataattataaaaacgacccaacacaagcaactgaaaatgttacaggcagacatgcagctggtgacactagcacaaataatttacatgcatcagatgctgcacgtgcaactgatctagatactgatactgatagtatccggcttaaagaagaacaattggatatcaataagcatgatgtgacgacgggtaaagtcgatatccataaaaatgttgtcaatgagacgaaaacagtcgacgtaccggttaaacgagaagaaatcgtgatcgaaagaaagcccggagatggtgcggctgcaactaccgatgtcaatgatacgctagaagacgacacgatcacgatcccaatcaaagaagaacagatcgatgtcaacaaacgcccggtcgttcgagaagaagttgacattcgtaaacaagaacacgaagatatgaaacaagtaagtgaaaacgtcggccgcgaagaactagatatcgatacgagtggtgatgcccacgtagaagacttacgcgataatgatcgcaacaagcatgaccggagctagtttctagctttgattttatcaaaccttttgaacaagaacttaaaaaagattactggcagccatcagaagatggctgtcagtaatcttttttggctctttgtgtgcgttcccgcaattaaaagccaaagaagccgaaaccaacgtcttcactttggcttcggcttcttttactgaatcaactaaaagaccacgtggtttccacgtctggttttactgctcttatactaaaaaaatggactatttgatagttatagaccctatatattcatagcccctttctgtttggtgttaaagtattagtcatcgatgtcatgcactatcttgtttagctccgttttgatgaaactgggaatattttctaaattgaaatgattatatatttctttatccttaagcatccttttttgtgccttatttaatttacactcattgttacccactacccattcatcctttgtacgtataaaggggttttgcgcactttcctttaacgcgttttgaacatcttcataaggtaaataaaattcaattgtagatttataattgccgcaagtgacaaagcacgcgaagtcttaggttggacgccacagtatgacaatatgaaagcaattattgaaactgcctggaattggcatttaaatcatcccaacggttatacagaccgcggttaatgatgaaggaacacgccagaaattctctggcgtgtttttttatggcctaatttggacatgcgtcattgtttttgttataatgaaaccactattgaggaggcactaacttatgcaagtattgattcttgttttaacttatctaatcgccgttgaacacatcggtatcatggggctagaaatgtttgccagtgctgaaacaaaggcgaaagcttttgacatgccgctggactttgtcaaactaccaaatgcccgcgtggcactggccaaccaaggcatttataacggaatgttgggcgccgtaattatcatggtcaacctgttattagccggccaaacgctcaagattgtcctcgccctattaatgctctacatcttcatcgttgccctttacgggacatttaccgccaccaagaaaattttcttcttacaaggcttacccgctttaatcacattattgttaatcttattcttctaaaaaagagctttaatcatgacaaatccaagaacgtcttcaaaaacatcggcgcttcattgaaaaatgtcgtcggtggcgaaatcaaagcctatactgaaatgatgactgaatcacgcgatgtagccatcgaccggcttcgccaaaatgcacttgaaatgggcgcagatgcggttgtcacgatgcgctttgattccggttcaatcggaacagatatgcaatcagttgccgcttatggcacggctgttaaatatatcgactaacaaaaaaagatgaacggttccctgatattcaggaaatcattcatcttttttaatttacttattaattctaatcaacaacttaagccgctggtgctgcgggttgtgcgctatttaaagtccacgtaatgttgctcgagaatgtatcaccagccgcaagttgaatacttggattggcacttaatgctaatttcccagcaacttgccatgttttcgacatcttatccgtcataatcggtgtttcagtaccattatcagataatcctacgttcgttggcaagccagtcatattaatggctgtgctgcttaattgtttgcctgtggttgatgccattttactcatcttcgctgtcaatttccaacctggcgttgctctaatatccgtgattttcaacccatcactgacctgatattgcttgtcctgagcagttgtaccaacataaatatcttttgataagacgttcccagatctaaagctaggcacttgatccaatgacaacttaccaactgctggttgcgcttgtaattcagcttcgttagaaacaatcgtaactttttttgaacttccacttgattcttccgttacgttagtcgttaatgttagctgtgctcgataactctttccagccgtagttgcagctgcagcatctttcatgaaagtactatctttactaaaggttagtggttgttccgtatttaagttcgctaaatttgtaatgtcacccttaagattagaaacaccactattagtagcgggggttattgtcttatcctcaccatctgtaaattgccattcataatgccaattactcgttgaaccagatgccttagctaggtctgacaaaccatcaactgaccaagtcccaccgagatccgccgctttcttgtaggctgctaacccaccaacataaaccgttttctctttagagacattccctgcagcaattttatatttagctggaatccctggtgtattcggatctttattcaattttccagtataatacaaatctggcttatacttttcaccctccacatcaatcgcttcgttaactttattcacttatttcgtgcgtttaatagtaaaatgattaagcagttggtacagttggtgttgttgatgaaagattccaattaattgttgttgtgaaactctcatctttagctaaatcggctgctggatttgctgctaatgttaacgtagctgcttccatcttgaaattatcgacaccatgtttcccgttacctttaaccacttcaacggcaggagaatcgtccttaacagcacctgttaaagtttcaccaagtgaaccagtagaatctaaattcaatattgcgcctgttagtttattagcatcatctgtgaattgagccatgtcagctgtcaacgaccagtcagatttgcctaaacgtatatcagcaatttctaaagcgccagctgttttagcaactttaccagtaaaaccagcataaatcgcactagcttcaattgtcccaaagctgaaacttggtactgattttaatactaatgtcccattttcaggatctgttgggtttgttggatccttagcaacaacactaaagtcggcttttgatgtttgcggagcaactgcgtcagctgatactgaccccactgtcattgctgttggtgctaccattgttgctaatgctgaaaataattttgtcttcattgataattcctccaaattattattaattacatttaatatagtagcacgcaattcaattgccggataacaaaaaatagataccatacggtatctatttttacccttcactaattattcgttaaaccgattccaatcctgtcctagcagttatttccccattaccattcttctagtgtaaacagcttgcccggaatgcatgaccgcatcatccacgattgagactaagcgtgcttcacgggtaactgccggtgtccaattttcatcaattatctctaataaagactcgtcagtaacttcagccaggtaatcaagcgtcaattgcaatgcgtctgctaagtaaccaattaataatgctttatcggtgataatcactttggctgcttcttctggtgaatgcgaccaatcttgcgtttcatcgggtagatctaatgcaaatttttgtgaccaacctgcacgtatccacaatggttgtatccctttcaaatccgcaatctgataatccatttcacgggcagtatgccatactaaccaggtcaccgatttaattagtggctgcggcattgtattggcctcagccactgtcatttgttccaatgtatcgagtaatcgttcttgagcgcgttcgaccgttgcacttaatagttgcgttgcatgcatcttatcatcctccatatctaaaagttaaccccattgtatcattaaaccactactaggcttttttttatgaatttaccaaaccattacgaagctttacactttattttcactagaacaacaaacactttacattatttgtttatgcttaaccttgtaaagaataaaaaatcgttttacaaggagcaatcaatatgcgcatgagccaaacaatcatcccttacgtggcaacaacaactttattacttttggcagtcggctgtaccccacaaaaaaatgctaaacaatcgacagctcatcaatccacccttgtccctaaacaaaacatgagtcgccacattcaattagccggtgcgattaatactcgtgatctaggtggaattgtcacgaaaacaggtgccaaaattaaagccaatcggttaattcgttctggtgaattagctggtttaacaacgaaggataaacagaagttaaccgttggaaaacaattaaataacatcgttgatttacggactagtagcgaagttgcggctaaacccgatcccgctttaagcaacgtccactacaatcactatgatgtcaccaagtctttagggacttcggcaagtcaagctgactttttcaagaatctcgataaggttgatggtgaagttttcatgattgatattaaccaaaaattggttactgatcccgcagcacgcacgaactataaacagttctttaatgtcttattgaataataaaagtggtgcgacactttggcattgtacagccggtaaagatcgtgccggattcggtactatgttagtcctcagtgccctcggggttgatcaaaagagcatcatggacgactacctcgcctctaataaatatcgccgcgccgaaaatgaaaagacaattgaacaaattaaggtggcaactcacaataaccccaaagccgttaaaacgatcactgcaatgatggccgtccgtaaaccctatctacaggtcgcatatgacacaatgaacaaagaatatggtggcgttaatggttatttgaaacacgggctgggtttaactaaggcggatctcaaccaattaaaaacgatgtatcttaccaagagttaatgcttcatcaggtagattcactattctcgtctctccatttttttggtatactgctccttagaatcaatcagttaaaggagcctcatcatgtcacctgctcaacatctcattttattattgatcgtgatcattgctgcaatcggcgtcttaagttcatcagtcatcttattcatcgcccaacaaaagaaaaatgaccaacttaagaagaaatcgaatgtgctcttttgggtcagcatcctcgtgatgatgatctttctgaaactaatcgatatgcttcaataaacaccaaaaagcatgccagtcaaatttgactagcatgctttttttgcaatctatcttctaaaaaaccacccttaattctttgctaaattacaaaacttggtctaagcaattttattgttccccacctttgaggatgttatcttaactactaaaggaggtgtcactatgaaaaccttagacaatatcgcgcttactttattaatcgttggtggtttgaactggctacttgtcggtctattcaaattcgacctagtcgctatgttatttggcggtcaagcagctattatttcgcgcatcgtatatgtccttgttggacttagcgcattatattgcattaagttatttgcacccatcaacagcgcgcagcatgaatagctttctggagcggctttttatagggaccaaacatcctgctcgtctcaatcgctatccattaacgtgttggtaaaactgttatttcttttcaataacgcaaaaaagcgtgctagtcagcctcgactagcacgcttttatttttttatttacctttggtatcttcatcattcatcttcaaaatggacatgaacgcctctaatagacacgtttactatactttatcagtccatggactagctgttttaacaagagctttgttaagttcatcaatattttcgaatccagtagtacgcaaccattcacgtgctgctttttcaccttctttgatgtaaggttccacagatcctgcccaagtagcacgtccacaaagcacaccattaaacttggcacctgagtcgtgagcaaattgcaatgtttcttggaacaatttagcagatacacctgcacttaggtagatgtatggaaggttagtcgcttcttcttgtgctttaaagaagtcagcagcttcagctttactgtaaaccacttcaccatcagcaaaaccttcgacatatttaacgttaactggtacttctactttaagaacatcaatgttaaagcgtggatcagagaaaactttcatcgcttcaatgactttgcgaggtttcacttttgcatattcaacagaacctgcatctgagatttcttcatcataagcaaggatttccaagaagaaaggaatatcttcagcgacacattcagaaccaacacgttcaatataagcttgtttttgttggttaagttcatctgagctgtctacatcatagtaaagcaagaacttaacggcatcagcgccttgctctttgatacgttttgcagaccaaacatccaagcagtcaggcaaacgttttgtacttgatgtatcataacctgttttttcataggcaagaagaagacctgcttctttatccaatgcttttgttgctggaagtccatactcagggtcaagcaacattgaagaagcgtattttgtaagttcatcagcaaccaaaacctttagttcttccatttgagctacagttggttctgtatcttgatactgtgccatcaaacgtttcaaagcaccacgttggtcaaatgccaaagctgagataacaccgtttttatctgaaagtttttccaaagatttgcgtttctgttctgtaagtaccatttttatacctcttttactccaatttgtgagtttagtgtttcgtaattagtcatattcacatgccctgtcattgtttcttgagcatttaacatacccaatgtcatcgcatgttttaataagtcagcgtcactttttttactatttaaagctgatgcaataccagctaccgttgagtcccctgatccgactggattaacaactgggatatcaggaatatctaccttatagaaaacatcaccatgttttgcaaaggcaccgtttcgacctaatgagaccactatccattcgataccactaaaaagtgactctttaagaacgtctttgagttcttcaatatcttttgttacttcttttccaagcaactgtgaaagttcctcattattaggtttgatggcagtaggtttagccgacgattttagaactgtttcaagaggtgcacctgaacaatccaaaacgactgctactccttcatccgaagcaagttggataagtttttcataataatcgttgggaagtcctgaaggcaaacttcctgaaattgtcacaacttctgattgtttaataagattgctatagtggtcaagaaagccttctgcttcttcatgagaaattgttggtccttgttccaaaatttctgtttggttaccctcgtgtaagatagcaatacagtttctagtgtttcctgagattttataaaaagctggactaacaggagattgttctaattcgctttcaataaattcaccaattttaccacctaagaaacctgtagcagtaactttatcaccagattcatacaagactctagtaacatttaagccttttccaccagctgtcttactaacatctttcaccctattcactgtatcaattttcaatgtttctagaggataagatatgtctactgaaggatttagtgtgactgtcagaatcattgggtataccttaatcgtggtactcaccccggtcccatttttcaaggaattctgtaaagaaatcctcatctgcttgatgtgcattatgtgtttcaacgtgttcgatttttgcaatcaattttttattttcttctgttggtttgtactcagcttcaatgaaagcttcaatgatgtcattcataagaagaccaccagtaatcattccaccaaaaccgataacattcgcattaagttcttccttagcatatagagctgacgtcatatcacgaaccaacgctgagcgaacacctggaactttattgactgcattgttaatgccgacacctgtaccacagatacatactcccaagtctgcttgaccacttactactgcttcaccgacttttttaccatagatagggtagtgagtacgtacgtggtcatatgtcccgaaatcaaggacctcatgtccttttgatttcaagaattctgatactgccatttttacatctgtgacaatgtggtcacatccaattgcgattctcattccttaactccctttcttaacacatcttgttaagcatatctactcggatttgatgacgtccgccatcatatttaccattgacgaaacctttagcgatgtttttagcaagctcatcaccgacgatttcagcgccaaccgtaatcattcgtgaattgttatgtccacgtgtcatataagctgagcgttcatctgaaacttctgctgcaaccatacctttaattttagttgctaccatgaatggaccagctccataagcatcaattacaatacctaagttttgctcatctttatttacttcagaggcaactgccaaggtaacatcaacaaaatcttgtccgtccttagtcacatcaattacctcaaaaccttcttctacaagaaaatttttcacaacatcttttaatctcgtacctttgagatctgcaccaacaacaatagccatttagactacctcctaaattttaaaaagaaatgctacgtagaagtagaaaatattttgaaaaatgttcgaaataacgttttcatcatctctttgtttataaaatatcaaacattcaaacaaaaagcaacgcttttttgtttgttttttgtttatcttttgttttttttaaatagataacaccgttaaattattgttcatttaatccatcacaaaatggacgtgaaatgtctattcaagtattacaaaagtcttttaattcctataatttactgattaagaggtcctgctttattttcgtcttatacaaaatctgacctaagctaatatacgtcaatcctctgttcttatttcatcatctaacgtttgtttttgtttgaaattgtttgttttacattgaaagcattgtcttttatgatacaattaaaagagaattatctttggaaaaaaattactttatgaaagaagagtcttcatatgaacaaaaaacgacgattagaaaaaattttagatatgttaaagattgatgggaccataaccataaaagaaataatagatgaactagatatttccgatatgacagcccgtagagaccttgatgctctagaagctgatggacttttaacacgtactcatggtggtgcacaattgctttcctctaaaaagccacttgaaaagacacatatcgagaagaaaagtctaaatacaaaagaaaaaattgacattgctaaaaaagcctgctctttaatcaaagatggcgatactatttttattggacccggaactacagttgaacaactggcattagaattgaaaggtcgtaaaggttataaaattcgtatcattacaaatagtctccctgtgttcttgattctaaatgatagcgaaaccattgatttattgcttcttggcggtgaatatagagaaataactggagcttttgtaggttcaatggcttcgacaaatttaaaagcaatgagatttgccaaagcttttgttagtgcaaatgctgttacccataattctattgctacatatagtgacaaggaaggtgtgattcaacaacttgccctaaacaatgctgtagaaaaattcttattagtagacagtactaaattcgatcgatacgatttctttaacttctataatctagatcaactcgataccatcattacagataaccagattagccatcaacacttagaggaatttagccagtacactactattttaaaagcggactagaattatgacttataaaaatattggactactcttaaataatttggattgaagtcaatatttgagacagatttcaagagacattcagaaccgcgtttaccttccacagttcaaataagttattaatcgcgattaataacttatttgaaccctgaaaagcattaaatcaggcggccatttggctcgtaagtgttgcaatttcagccgaaaggttcaaccttttttgtagtaattaaataataagttgggagaaatcagcatgattcaaaccgtaacagaacagaacatcgcaagctttgttcaaacacaaccgttagtgattttagacttttgggcggattggtgtgcaccttgtcggattatgacaccgatgattactgaactacatgaacaattagctgatcagtttggcttaggaaccgttgatgtagaggatcaagcagcgttagctgaacaatatgcgattcaatccgttccaaccctattaatcttcaaaaatggtcaggcgacagaaaaggtaactggcgcttttccaaaagagaagttaaaaagatacttagataagaaaatcgctgaaatgtaatcagcgcattaatagtagcccgcaactttcattggagagttgcgggtcttttttgataagtagaaataaaataacccccttagctattgtctaagggggagatgattattgacgaaccatgtggataacacgttgataaaggattaatgcgccaatctcacaaagtaaaatcaaaacagctaatggaagataggtataactgcccatcacgccaactaatggggaaagaaaaatgccgaaaacatacataccaagtccaagcactgaagaagcaatccctgcatgttgtccttggcgttgtaaggccagtgaggtgacaacggcattaattagaccaagtgttgcgaccactaggaataaaccaattaaagctaaccagagacgattagagccaaagccactaattaagacgcagatggcaccgattaaaccaccaattaagccgatttttaattgttgtaattcatcaaaccaatggattaaaatggtggacatttcagccattaagataatcccaatcccattgattccgtagattagactgaaagttgatttagaaagactaaagacattttgaagcatgaaactggaacctgaaatataacagaacattgccccataaacgaggccttgaattaaaacaaataggatgaatgggcgatctttaaaaatggcttgaataccaaggcgcgattgttgtgccgattgcgcgcttgtggatactgtgtgtgtttctttgaatcccaaaatgatgcctaacaatagaagaaggccaacaatccctaaaaagccgaaaatgccttcccaagaggtgaaacggagcaaagcacttcctattaatggtgaaatgatggggaagataccgttgattgccatgagtaaggcaatgaattttgtcaattgtttaccgtcaaataaatctttagcgactgctcgagtaatgacctgtcctgcagagctcgctaacccttgaataaaccgtaaaaggaagaatagccaaatattgtgggtgactaacgataatagacacgctgtaaaagcaagggcggttccgattacgagtggctttttacggccaacacgatcgctccaggcacccatgaagatggggccaatcgcaagtccagccaaacacatggttagactcagttgaatcatggaagcagatgaatgaaaatcagcttccataatcggaaatgctggtagatacatatccactagtaggggtccataagcactcagtgaaccaagtaaaacagataaccatagtgttcttttttttgttaaaaccatgttaataaaccctcctaaataaaaaagtgtaaaaaaatagcccgttgaaaacgtagctagcgccgaacgaatttaattaattactattcatgttgcttcttagttacactaacataagaagtcgggtttgtggcgatatatgagcaatttttaatatgtaaatggtttctatttcagtttaaacaagttatgatggagataatgaaaaaagttgtcgaatgaggttttgccatgaaaattgcccaaaaaaataaaatattagaaacctgcctaattgcgggacggattatgattgaaagtggttctgaaatgtaccgggttgaagatacaatgaaccggattgcttataatgcaggcattcaaaagagtgttgtgtttacgacaccgaccggtttatttatcggaattgaaaatcaaccttatgtgcaactaggcgctgttgcggtgcggacgattaaccttgaaaaagttgaaaatgtgaatactgcttcacggcaatttgcgactaaggaaattacgttggatcagttaatgttacagttaaaacaaattgatcaggatacagctcattttccgttgtggttacaaattacagctgcagcagtcatttcagcgtttttgatgattattttttctggtgaatatgattggttagatatcataccgtcagcggtagccggtgctttaggctatgccgcctttgcggcggtcaatcgggtcacaacgattcgctttatcggtgaatttttaagtgcgacagtgattgggatagtcgcctatctattaactaggtggcacttaggagtcgatatcgataatattatcatcggggctgtaatgccattggtacctggtgtagcgattaccaactcgattcgagatttgctagcagggcatttattatctggtatggcacgtgggatggaggccatcctgagtgcctttgcaattggaacagggattgcgctcgtatttagattctttatgtaaagagaggttcatcagatgccatattgggttcagtttattattcaagcgttatttagttatatttcaacggttgcgtttggaatttgtattaatttaccaagacgcgcattattatggtgtggctttgccggtatggcagggtggcaggtctattggatgctctttaactttggtagcgggcggatgcttgctaatttgttgggtgcgttagctgttggaatttgtggcaatattatggcccgttataagcggatgccggtgattatctttaatattccagggttagtaccattagtgcccggtggaactgcgtaccgtgcgattcggaacctcgtgctaggcaacttaaatgaagcttcgacacaaggtgtttcagtgatcatgattgctggtgcgattgccgttggctttatgttagcacaaattttagccgatataacacgcaaacgagcgattacgccgaaatgggtatcgcgtcactaaaaagtatgctataataagtctatgcgatgagtcgagtaagtctcggtaggcaactattctgcgaaggcagctaggagacccaaagatacaggataccacggttattcatttaaccacttgccgtattgcaagggtgttttcgcccgctgtgttgtggagcacaaggtgtttattcttcggaatactgtaaaaaaagccccttccgtcaggaaggggcttttttttgtgcgttcattttcttgcatgacagcgttactgatggtgcgatggtcgactaattcaccaatccgttttagatgtttgagatgtgcatcgtagtgttccgaaaaaacgggcgcgtataaaacatttaataggaagatgatggaggtattaatggtaaagttgccgattttcgagtagagtttttcgcgggttgtaatcggtaaaaagcaagtgcattcttgcgaaagtcgattttcaccgatactggtaatcgcaatcgtcgggatgttgcgggcgcgtaaaatagtgttaagtgctagtaagttgggattctcgccagaataggaaattaaaatcgcacaagcatccggactaagattataggcatcgtagttttcctcgccacgaaccgcagatagcgtaacgtttttttggatacgattcattttgagggcaaaatcttgcgcgatgagtaagtttgagttttgggagaagatttgaatatgatttgccttgaggagcaatgatttagcttgactcagatggtcgtggtcgagtaaaaagaagatatcatcaatcgtcattttgtccaagaccgccattttcttacaaatagtcatcaaactatccgtactcgaaaagggcagattgggatcgatacgcgtaaaatgtttattgaggtagcgccactcttctagatagtgtttcttaaaagatttccaaccgtcaaaatggagttttttggcaatgcggaccagagtggacggttgcgtataggtttgagcagcaatttcttggatggaaagctgatcgagtgcttctggagccgttaacaagtaatccacaaccacggtttcagcgggggaaaacgcgaatgtctctagtttttctttaattaacatgtaaccgcctccttttacaaaagattagcgatataattttatattatttcatccggcaacttgacaggaccctagtacatagcttgagtggtggttctttttttattttagacattagttcatttaattaggaattcagatagggaaatatactgaaatgaacgtaactgataaagtcggtcaagagtggcaatttatactaatttttgaaattacagataaagaagctaatcagggcaccgttgatttgaagaaagcaattaactgaggtgtcttactttaattgcctagcttgtttagttgacccacttgtctagaaatgttaaattgattctattcaataaaggcgttgattgttgggaggcgatgaaagtggatgaacgcattacagaataccgggatgcggtttatgagcaggtggtcaaagtcgggaagtcgttagggaacgtgacgcgtctacaactgttgaacattcttgcgcaaggccccaaaacggtggaagtcttagccagtacagtcggcttaagtgtcgctaccgtttcacggaacctgcaaattttgaaacaaacaaacttagtggcgattgaacgcgagaagaattttgttacttatcgtttaaattcagaacgggtcaaacaattggtaaccctcttggttgatgtctgcgaagaaactttgccagagatgacgattttggaaaaaacactcgcgcaagaaacaggtgcccccgaagcgttaactggtgacgcattgaaaacgaaattaatggcagacgatgtgtgtttgattgatttgcgtcccgcagatgagtttgcaagtcaacacttaccaggggcacgcaatgtgccgtatgatcagttggatcaacgattagctgagctccccaaggataaagaagtggtggtttattgtcgtggtcgtctatgtgcttacgccaatgttgccagtcaacaactacaagctgctgggtttaaagtggcaacgtttaatcaatcagtgtgggaatggtcgcgagttatgaccgaaacggaataagatgaagcgtcctttttgacggcacgtcccaatggtggtatattatgagtaattcaatgaaatcgttgaatgattttcttgaaaagaaaggtgatcgcaatggcaacacaaattctaactgaagcaaactttaaagatgaagttcaagaaggggtcacattagtcgatttctgggcaacatggtgcccaccatgtcggatgcaaggcccaattgtcgaagaactagccgacgattacgcgggtaaagctaaaatcgccaaagttgacgttgatcacaaccaaaacttggcggctgaattcggcatccaatcaattccaaccttgttggtcatgaaagatggccaattagtgcaacaaatggttgggttacaacggaaagaaacattagcacaagaaatcaatactgccttagcttaaaaatagcttgaaggcgtatcacgattaaataataacatcatccgataagctcttaagtagggcatatattaggtgatgtttttttgtgttgttattttaagtaatccagcataacggctttaaagaagtcgatgtgtttgaggtacatttcttcatcaacatattcgtcaatcatgtggctagtatcattgccggggccgacaactgccacaggtaagtcaggattgtgcttagcaaggtgggcggcgtcggtaccgccagcaacgtgcatcagtggataagcttgggataacttttgtgccccgattttttgaacagcttgaatgaatggtgcttgtggattgctcttaacgggtggttggttattaatgacggtcaattccagattcatgtctacctgttgattgagttccgcaatgatggtattgaggtcagcaatcacttggtcgccagttaaggcgggggttgtacgaacccgacaagtaagttctgtgtgaccggggaccgaattaatttgttcaccaccgttgattaaggttgtgacaggcacgatatcgccgaggacatcatcaataggatgtttctgatcgaagtattgtttttgccgattgtagtaggcaagcaaatgatcaattgcgttaataccgagtgcgggcattgaactgtgcgcggttttaccagttgccgtcactttaaaatcaagggaaccgttatgggcgaaaattaagaaatgttgttcattggtttgattagccgcaaggagtttttgggccatttctgtggggaatttatcggggttatttgccaaggcttgtttatcaacgccagatggttcggcaactaataaggctgttaaatcatcggcatagccttgagcggttaaagtttgcgcaccagtttcgttcttttcttcatcgacggttgcgagtagtttgatttggtcgtttaaaggaacatgttcatcgtgtaattcgatcattgcaatcacaagcgcagccagaccagacttcatgtcggttgcgcctcgaccgaagagtttaccatcgcgagcggttagagtgaagggattactcgtccatttgctgcgatcaccgatgctgacgacgtccatatgaccagtgacaccgaggactttgtcggttgcttcgcctagataggccactaagttttcgcggcctggtttagaagccactttttcagtatggataccatgttgtgcgaatagatcggctaagtagtcggcaatcacaccttctgcttggtctgttgtatcaattgagaccagtttttctaaaattgcgattttttcagttttttccatcatcaaaagatctccagataagattcaatatgcattatagagcccctattttgggaaagcaacggacataaattaagcaatttcgcaaatcaagtgggttaaaaaagcctgaccggcgcggtttattcgttaaacccgtgcatatcaaacagaacgcatggattggtgccggcgcaacgattttaccgggggtgacggtcggtgagaatgcgattgtcgctgctaacgccacggtcaccaaagatgtaccagacaatatgattgttgccggaacgccagcgaaagtcatgcgtcaaatcaaattagaaaaggagttttaacatgtcaattcaaaataaagtcgtgatcattacaggtgcctcatcagggattagggcagcaactgccaaattattagcaagcaaaggggctaaggttgttttagcagctcgtcgtgaagatcgtttacaagctttagcatcagaaatcggtgcaaatgcgatttatcaagcaacggatgtgactaatcgggatcaaatggcgagcttagtccaattggcgcttgatcatttcggtcgcgtagatgttttatacaacaatgccggcgtcatgccacaaggaaacctgagcgaacgcgattatgatcaatggcaaaagatgctcgatatcaacatcatgggcgttttaaacgggatcggtgcggtcttaccaacgatgcaagcccaacaagatggtttgattatttcaactgattcggttgccggacatgtggtttatccagcttctgccgtttataacgggactaaatatgcagtgcgcgctattatggaaggcttacgccaagaagaaaaagataacggcattcgttcaacaattgtttcaccaggggctgttaaaacagaattggtgaatacgattggcaaccctgctgttttcgaaggggttaagcaattaatggatgcaccagaagaatcagcgttggccctcaatccagaagacattgccaacgcagtcttatatgcgattgaccaaccaaaacatgtagtggttagtgaagtcttaattcgcccagctaaacaacaagtttaagaaaagtgggcgactaagcgggtagtgcgtgcggattagcctaagcaggcgaataactgatgcagtcagtggtttgactgatgtagctaaacgtaaggcattgcttcgacgagcgcgtttcaaaatggtatttagtaactgagcataaaaaaatcaccttaatctgtttttaagattaatgaagtgaaccccaaatattggacgaaactttaagttctacaattgaattttatttaccttatgaagatgttcaaaacgcgttaaaggaaagtgcgcaaaacccctttatacgtacaaaggatgaaggggtagtgggtaacaatgagtgtaaattaaataaggcacaaaaaaggatgcttaaggataaagaaatatataatcatttcaatttagaaaatattcccagttccatcaaaatggagctaaacaagatagtgcatgacatcgatgactaatactttaacaccaaacagaaaggggctatgaatatatagggtctataattatagttacgcccctagccatcaaacattgaatcccaagtcaccattgatgggtcggcggattgcatttctgggatcgtcaattacggccggtgcgggtgcactggaagatttgttcgtcgattatctcgtcgcgacggatggcgtgattgccatcaaggaagcggtgagtggcagcactttagcaggtaacgcaccagatagctatgtgcagcggctctatcatcggattccagtgacccaaccattggacgcttttgtctgccaactttcaaccaatgatgggcggcatgacaaggctatggggcaagttacgggtgcacaacagcgccacggctttgacgaaacgacgacgctcggagcgattgaaacaatcgtggcctatgttcaacagcattgggcggtgccaatcgtgttcttcacttgtgtgcgaaaatacgatgcgaattatggtaaattagtgcagcaattgaaagtcttacaaaaaaagtggcacttcacgattattgacctctggcaagatccagtggtcaaagctgaaaatcgcgcccaaccactagcaatggtcgacgacgctcatccaacccgattaggttatcggaatatctggacgccaatttttcggcaacaattaacggacgtgcttcgccagtcggaaccataatcgtcaatcgatttcgcgttttcaaggcttccgtcgatagtctaaagaaataaacataacgaccggatgaacctgtcatgtgataggctcatccggtcgttatgttttagcttacttcaaattttaggttagtctgcgacttcaatcttcccaaccgcaattggtaaggtgacgtgtgcatcgtaggcgccaacttcaccagcaacggtggctggtaaagccaagtcttgtggtacgccgtgaatgtagatgacccgtttgtcgagttccaagtcatcggtaccaaagacttctttgaacttcgcttgcaaatcagctaatggcacatcgatttcgtaggcaaagtggccttgggcgtcagcgactgggtagttatcatttggcacgtccatgtgatgtggggcgttgtcaaatggcaccatcgttgtccctgagactggttcagtttctggcaagtcgacaaatccgtcatgattggcatcctgcgccatcgtggcaatttgggccgccttaccatctggaaaaccgtggaaatgttcccagtgttgcgtatttgcaggtgtatcaaacatttcaatcgccacgtgtaattggtcaccgtcttcaacaaaggtggcagttccatggggtgccgttccaataccttctgcgtttagtggtacgatgttagcaacgtattttttagtcatgaatgattcctccaattcttcattataagtccattatatgctattctaaacttattaaaattgatatatgtcaagaaaggaaaatttatgcactggggcaaattctataattaatccgaacagaaattaaaaagcccaaagcaatcacttacagatgaattaatcaataagttaccaagtaatgttcaacccatcactcattccgatcaaggatggcattaccaactagattcctatacaaaaaaattatctgaacatgaatttatccaaagtatgtcccgcaagggaaattgtcatgataatgccccgattgaaagcttttttcacctttataagaccgaatgtttggctggattcccaccgtgtaaaggcttagccgaattaaaagcagtttctttagaatatgttaattggttcaattaccgacgaatctcatcaaaaacaaagggtatgtccccgtgtgaatatcgagaacataccttagcggcataataatatttacttttgtctaacttttgtgttgcacttcatgcactttaaaatgactcaaggctagtttttatttgctactgagccatcgttaatgatggccattttgttctaaagtacattcgtgatgacgcaatgattcaccggtatctcatccagatactaagccttcttctctcgaatggagcccaccagatcatctgtagctggagcgttcgcaagcaatgcgcgaacatcatcaagattcaccttaacattccaaactaaaacaccaactaacttatcggtatctatgaaatagacaagcgatccatgcgttcgccgatcaaaaatcaattgcaatttaggatcaatattaccgattgcttgccaggaaatatcaaaaatcatggaatagaagtatggggtatgctgatagctcatgtgagcacccgccatattacggccaactaattcaccagaaagtcgggcatggtccacgtgctcaatccgttgccgacccaagatgtgatctggataagaggcaatatctccagcagaccagatggctgggtcactagtattgagatactcattaactttcacaccaccatcagctaaatccaaacaactgtcttcagctaaactaatccgcggcgtaacgcctaacccaacaatgatcgtatcggctgcgatcaccggaccatcctttgtcaatagagtcaagtggtcaccttggcgttgatatgattggacaaactgaccactcatcagtgtgacaccattgcgtttgaacgtggcttcatactcagtccgaatagactcaggaaatttaccctcacccagcgctttttctggaaaaatcatcgtaacttcagtctcattttgggtcagtgacgatgcgagctctgtaccaacatatccaccaccaatgatcacaactcgcttgttcggaccactaaatttacgtaacttgcgataatctgaccactgtctaaagactagcacatgtggatcagaaggtccctggatttgtctaggttctccgccagttgctagcaatagctgttcatacttgatttgctcactatcggccaatgtaatgaccttatcttgccgattaatagccgtaaccgttgtcttgaacttaaaagtcacattgggataattttcagcaccaatctgaatgttctcttcagtaaattcatcatctagccatagttttttactcagtgccggtcgttcatatgggacatccgcctcttgcgaaataattaagatctcaccctctgaatcttcctgtcgaattcccttgatggcatagccagcaaccactccgccaccaacaatgacgtatcgatagctgtttgtctgatccaaatcactcatctaattacctccataactttactttttctaggatcatcgtaacataaaaacgccatgattctaaaaataacgatcaggattgtcaatcgttgcttgcttttatcagaataataattttatttacatactgctacaaagctatcaaatatcactatgatccagatttagaattgcggataacacagcataaaataatattattttaattaaactttgttctttgaaaactggataataagtaatatattagttttaaaagccgagaaaacattgcgttttaaagagttttttaatagaaatatgaattagttcatatcgctaaactcaaataataaccctttaccgtaggtaaagttaggttaagttataaagggcgcacggtggatgccttggcactaggagccgatgaaggacggtactaacaccgatatgcttcggggagctgtaagtaagctttgatccggagatttccgaatgggggaacccaatacctttagtcgggtattatcattaagtgaatacatagcttaatgaaggtagacgcggggaactgaaacatctaagtacctgcaggaagagaaagaaaaatcgattccctaagtagcggcgagcgaacggggaagagcccaaaccaagaagcttgcttcttggggttgtaggacagaacattggagttaccaagttaagttgtaatcgaatcagctgggaagctgagtcaaagagtgtgataaccacgtagattaaacaacttaacctccgttctggatcctgagtacggcggaacacgtgaaattccgtcggaatccgggaggaccatctcccaaggctaaatactccctagtgaccgatagtgaaccagtaccgtgagggaaaggtgaaaagcaccccggaaggggagtgaaatagatcctgaaaccgtgtgcctacaattagtcaaagctcgttaatgagtgatggcgtgccttttgtagaatgaaccggcgagttacgtttatatgcgaggttaaagtgaaaagctggagccgtagcgaaagcgagtctgaaatgggcgagtgagtatatagatgtagacccgaaaccaagtgacctacccatgtccaggttgaaggtgtggtaaaacacactggaggaccgaacccacgtcagttgaaaatggcggggatgaggtgtgggtagcggtgaaattccaatcgaacttggagatagctggttctctccgaaatagctttagggctagcctcggaatattggatcatggaggtagagcactgtttggactaggggcccgtcatgggttactgaattcagataaactccgaataccattgatttagttccgggagtcagactgcgagtgataagatccgtagtcgaaagggaaacagcccagatcaccagttaaggtcccaaaatttatgttaagtggaaaaggatgtggcggtgcacagacaactaggatgttggctcagaagcagccaccatttaaagagtgcgtaatagctcactagtcgagtgccgctgcgccgaaaatgtaccggggctaaacataataccgaaactgtgggtggacacgtaagtgtccgcggtaggagagcgttctaagggcgatgaagctagatcgtaaggactagtggagcgcttagaagtgagaatgccggcatgagtagcgaaagatcagtgagaatctgatccaccgtatgactaaggtttcctggggaaggctcgtcctcccagggttagtcgggacctaaggcgaggccgaaaggcgtagtcgatggccaacaggttgagattcctgtactagtttattttgtttgaacgatggagggacgcaggaagctaaggaatgcacacgactggaaatgtgtgtctaagcaacaagtcttgagttgagtgaaatgcttgattctttaaggacaagttgtgatggggagcgaaattaagtagcgaagttcctgatgttacactgccaagaaaagcttctagtgagaaataaactacccgtaccgtaaaccgacacaggtggtcgaggagaatatcctaaggtgagcgagtgaactctcgttaaggaactcggcaaaatgaccccgtaacttcgggagaaggggtgctgaccgtcaggtcagccgcagtgaataggcccaaacaactgtttatcaaaaacacaggtctctgcaaaatcgaaagatgacgtataggggctgacgcctgcccggtgctggaaggttaagaggatgagttagcgtaagcgaagcccagaattgaagccccagtaaacggcggccgtaactataacggtcctaaggtagcgaaattccttgtcgggtaagttccgacccgcacgaaaggcgtaatgatttgggcactgtctcaacgagagactcggtgaaattataatacccgtgaagatgcgggttacccgcgacaggacggaaagaccccatggagctttactgtagcttgatattgagtgtttgtacagtttgtacaggataggtaggagccgtagaaatcggaacgctagtttcgatggaggcgttggtgggatactaccctaactgtatgaccactctaacccgcgccacttagcgtggcgggagacagtgtcaggtgggcagtttgactggggcggtcgcctcctaaagtgtaacggaggcgctcaaaggttctctcagaatggttggaaatcattcgtagagtgtaaaggtataagagagcttgactgtgagattgacaaatcgagcagggacgaaagtcggacttagtgatccggtggttccgtatggaagggccatcgctcaacggataaaagctaccctggggataacaggcttatctcccccaagagtccacatcgacggggaggtttggcacctcgatgtcggctcatcgcatcctggggctgtagtcggtcccaagggttgggctgttcgcccattaaagcggtacgcgagctgggttcagaacgtcgtgagacagttcggtccctatccgtcgcgggcgcaggaaatttgagaggagctgtccttagtacgagaggaccgggatggacatacctctggtgtaccagttgtgccgccaggcgcatcgctgggtagctatgtatggacgggataaacgctgaaagcatctaagtgtgaagcccccctcgagatgagatttcccattcctttatggaagtaagacccctgaaagatgatcaggtagataggctaggagtggaagtacagcgatgtatggagcggactagtactaatcggtcgaggacttaaccaaaggtgcaatgttaggcttttgaaatgaaatattacttattatgcagttttgagagaacgaagttcttctcagtgcgcaagcacaaaatagtgtggtggcgatagcaagaaggatacacctgttcccatgtcgaacacagaagttaagcttcttagcgccgatagtagttggtgggaaactacctgcgaggataggacgttgccgcgcctacgtaatcgccaatatcagcgaatgcttgtttagcgtactctttagcgatatcatcagctgtaacgaataggtcgttagcaatctcgttacgcagcttatcaatttgctcacgcacactagcatttactagcaaccttgggccatttacattagcggtcttataatcaacgtcataagcttgcatataagcccatgtggcattgaatcgttgcagatagtacaagcagaacattttctgttgatcgtttaacccatcattagcagataattccttcactattttgggtgcaaccttttcaactttgtgtgcaccctttttgcttttggggtgcaccgcttttttatttggcccacgttcccatccattacgctgtttccatgatttcacggtattaatcgacacatcatatttatcagcgatgtctttgtacttcatcccagataaatagtcttcctttgcatcatttcttgattcatcatgcattacatagcaccgccctccttcttataattgtttttctccaataaaatacgccgctcattatctgaacgacgtttctcatctatcttcttctgtttaagccacttctctaaacgggcatctgctgccgtccattcaggtgtttcgtagccgtactttgaatgtattagtttcacaatgcctatcactcctttaattttatgtacaaaaaaagacagcctaagctgtctcaagataaactcttttaaaattgtacgcctaatgaacctaagccagtcgcattccatttgtatccctcggagcgagcaatccgcatcaattttcggattcgttcagcgttttcattacccaataagttcttaccattcatggcccaaattgtaattccatttacggttttagctgctaccacttgagctggcatatcttctgtagataaatgttttgctgcaattaaaagaatatccttaatatgctgatcaatttctttgtgggccaaatcattatacatttcatcaattatttcgaaaacttgctcattaatagtctttgacattatatcaccttccgttaaccagaatataccacaacttcatgtttatgtcgctacttccctaatgattgtaattgcatttcactttattaaaaaagttttcaaatatctctttattgattttcgtgatgcatcatcacatcaattacacgttgtatttctactaatttaacagttggcgaataatcagagtctagtatgatttgtactagttcaaaaaaagatttatccatgtatcctcctaactaaaaaggacgtcgtattgacatccttcattaccttaagcagttgttgcaactggtccttcttctgctttcttctctttatctttcttctgtttccgaattttatcctttgcgcgcttataaacatctttgggactaggaagcccaaatacataaactaccatgatatcccttctttcttactttaattgtagactcaatcttacagtactacaaatattcgggattaaaaaagacagcctaggctgccttgataatattaatagattaatttatatacctctttgcccgaatctgttaaagtttcttgtactgcatttttaccgccaaacgtgccagacgccgtgaaacatagtccatttacttctaactccttgattgctagtcctaatgatgttattgaaatgtcattaaatatttcagtttttaataatccttgtgcaatatactcactgttatcaccgttcattattcctccaacagtgatgcttgctttattgggagctttcataatcggccatctattagctttctgcaatactaagagtgcctgtggtgatagtttggcaatcatagacaacacaactctcttatttgaaaagtgttcttttaaatcactatcattacttatattccttagaacgttggctaaaacatttaaggtatcatcatctgccggtgaatcattaagtatttctattaattttgaatacaatgtcagaccatagggatccgtaattaagtcaacaatacattgtaacgctttatcgtggtcgtctgatttttgtacataagaagcaacgaccaaagattttttcatatcagatatgttttggcctagttcatcgccagtttcaatcacatcaaaaataagactccctaaagacccatttaatatatcaacaaccaattctcgacctttagattttcctgtatcgattgcagcctctgcatactcatcagctgttaacctctgttgctctattctttgcttaagcgtttttttatcagcctttaaaattgattctggattattgatcatttctaacaaactttctctatccataattttcaccctccaataaatctataatacaaaaccccagccataaaggctagggctattggaggtgaagtatgtgccattactggcaatatcgcaggtgtggatttgcaccacacaattgccgttttaaggcgtaaagacgctttacctattccgccactgcgataataccctagtcgggacttaaacccgaatcgtgttcacatcacgttaatgtgccgctctaatcttaagctactaggaataatggttaggtccgcgatcatccacggcaacaacgtgctaaccccacgcttccagcaattagaattgaagtcgattaacctaacaaagtttgattaacgctaattgccgggtataacagatcgtatttttggcaacagcgcgaccaccgttttccgccggtgattactggtcacagtttaagcgcgctttactaataatccataatactaatttatcacggaaatccggctaataaccacagacaatccgcacaaaaaccgcactttttatttcttgaactcgtgcaagtcttcaatcatgaatgcatctgcaaattgcaggcatgcccgattcttataatatctgaatcgagtttcaccatacccgctttcaagctgagctgctgttacagtgttttcttttacatagatactccatagaatcttcctaatttgttcttgcaatttgggagtcgaaaacaaatggatttcattcaagattaaaatgagttatattgtctttaaatataataaggattggtgatgatcatgaagattgttgtgattggctccgttgcagcggggacgagtgtggcagcaaaggcgcggcgaaatagtgaagttgatgagattgtcgtttatgaaaaaggtcaggatatctcttattcggtttgtggcatgccttattacgtagggggtgaggttgaagacctagagacgttaattccgcgcgatgcggcgtggttcaaaaaacgcttcaacgttgacattatgacgggtatcgaagtgatttcaatcgatgaaaaccaacaagcgctggtcttgaaaaactttgagacgggcgagttgtttgaagattattatgaccgcctagttttagcgacgggggccacgccacgcattattgcaccgttcgatgaagcctaccaaaacgtcttcacgatgcataacatggtagatacacgcgcaatcgacgcgtatttacagcaccattcagttcaaaatgtgacgatttttgggaccggttatgttgggcttgaaatgatggaacaatttcaaaaacgtggcttggacgtgacgttagttcaacgaagcgcgcaaattatgacccattttgatggtgatatggcctatcgtgctgaacaagttattcgtgctaacggggtgcatgtgttaaagagtgtaaccgcaaaacaagtgactgcgcaggatggtgtggtatcggcggtagaattgagtaatcagacgaccattcaaacggatttggtcctactagcacttggcgttgaaccacaaacgcagttggtcgaccatatgaagatagctaagggaccttcaggggcgttgaaggtcgaccaacaaatgttgacgactgtaccgaatatttacgcggtcggcgatgttgttgagagtttctccgtaattgatggctcaccactgtatcgaccaatgggttcgactgccaataaaatgggacgaattgccggcaattcattgactggcggtggcttaacgcaccgcgggattcttggaacggggattgttcggttgttcgatacaacgattgcacagactgggtttactgaagcagtcgcgcgagctaaggactatgatgtggaagtactctacaacattaaaccagggcatgcagattacttaaatggaaccgaaaacgtcattaaagccattgctggccgtcaaacgggaaaattattaggtgtacaaatcattggtaaagatggggttgataagcggattgacgttttcgtgactgccatcacattgggtgcgaaggtggccgatttattccatctcgatctagcttatcaaccactctatgcaaccactaaggatccagtgctctatacgggaatggcgctcgataatgcattgcatgggcggccgctcttgcctccagctgaattggagcaacgcttggctgaaggtgaacgcttccagattttggacgtacgttcgaagcaaaaatatgcggacgagcatgttgaacatgccattaacatgccgcttgctgaaattcgtgatcggttcacggaattagatatggatattccaactgtcacctattgcaataaaggggttacggctaatgctgctcagaatttacttctgaacctcggttttaaatccgtgtataacttgagtgggggcttcaaaaattatcaggtagtcaaagcctacttgaatgataaataatataaaaataccgctgacaattcgctgtcagtggtatttttttgcgttgttatagatttttggtgaaaaattgagttaattctgaaaaaggaataagcgcgatacgatcatataaatcgacatgcccagctgcttttacggttaataactgttttgattcgttagcactggcaaaggcggcttcactgaaatgtcgtgaccatgcctcttcaccaacaacaaagagcatggcacgttctgtgatcgtttcgaggtcgcgcaatggatagaaatctaatagtttagtaaaagttgtacgagtgggatggagtgtcgagttggctgcgccacgttgggtacgataaaagtcgtagaattcacgttcgatatcagttgagttttcgtccagttcttcaggtactccatgggcgtaagtggttgcttgacctgcaatctctaatgtccgggatcgtgaggattcctcgattaatgcgttgccgcctagtgcatcacgctgttcgcgaacaatggcacccatatcggttaagttaatagttgcaagtgctttaatacgtgcgtctattttgagtgcgttgagcgcgaaaccaccggccgaaccaattgcgattaagccaatacggtcattggcgacacagtctagagtggttaggtagtcagtggctgctgagaaattctccgcatataagataggggcaatcgcgttgcgcagagcaccgttactcccgccccaagcagattgatcaaatgaaacggttacaaacccttgttcagcgagcttaatggcatataggttagctgcctgttctttaacggcaccgatgggagcaccgatgattagtgctggaaaaacagtttccgtcgagtctttgggaagaaagacgttagcagttacttgcatttcatagatattcttaaaagtgacgggatgctgttcaacggctgaactttgaaaccagttattggcgtcgtggtggacatcgccagttggtaaatccggattacgacggcgtgcattaattttaccggctgaatacgacggttgtctagatggcatgctactcctcctataaaaataatttcttatccttattataaaatataagaatgtgaaatactactttatattattaatttgtaaacgattaatttgatgtctgctagtgatgattgtaatagtcgataatggtcagatggttggcattttatagtgaaaataaaaaattaattatagcacagtgataaaccaattccggcttattcttttcgaagtaagttgtgactgccgctgaatcagtaatatctaactcagtagcatctgtccccacgtattcaatttgattttcatctaataagtgccgtaattcggtccctaattgaccatttgcaccagtgattaaaattttcatagaataaatctcctctattttaattcatccttaacaacttgtaatgccgcatgaatcacttgatgcatatcgtagtaacgatattgccctagacggccaccgaagaccactttgggttctgtcaccgataaatcgcggtatgctttgtataagcggttatttttgtcgttattgattgggtaataaggttcgtcaccacgtgaccagttcgcaggatattccttcgtcacgattgttttattcttatcgcctttaccaaattcaaagtgtttatgttcgatcacccgtgtataaggcgtttcggcatctgtatagttaacgaccgcgtttccttggtagttatcaacgtccatttcttcggtttcaaagcgtaaactccgatattcgagttcccctaattgataatcaaagaattgatcaatcataccggtaaagatgactttatcgtattgatcgatgtagtcttgtttcttatcgaagaaatcaacacccgtttcaacatcgattaaatcactagccaacattttttcaatgatttgtgtatacccaccaattggaatcccttggtatgtatcgttgaaataattattatcatacgttaaccgtactggtaaacgacgaataataaatgatggtaattcggtagccttttggccccattgcttttcagtataccctttgattagtttttggtaaatatccgtcccaattaatgaaatagcttgttcttccaagttttctggttctttatcgcccaacaccttgcgctgttccgcaattttagcggccgcttcggcaggtgttgccacaccccataacttattgaacgtattcatgttaaatggcaagttgtagatttcacctttgtagttagcgactggactattggtgtaacggttaaactctgcaaattgattaatgtattcccagatttctttgttgctagtatggaaaatgtgggccccatattggtgaacttgaatgccatcaatttcctttgtatagatattaccagcgatgtggtcgcgtttttcaattactttaacgtggttcccacgtttggccgcctcgtatgcgaaagttgcgccaaagagtccggaaccgactactaaataattagtcatattattttctcctaaatctaaattattatctcaatcattaattaacgagtaactttctttactaatctgacaatatctctgttaattctagttctcaataatacaagtagcaatacatatacaattgtcacaataattgaattaactaccattgttaagaacaaactaggtaacacaattttaaaattcaggacagcaagaacggtcattagaaaagcaagtacatacctaagctgttcatgaactagataccgtaaatctgcttctttacgaaccatgtaaattctcatagaacatacgataaactcggttaaaataataaccgccgttccgccatccgctccccagatattaacacaaatcacatttaaaataacactaattaccgcacccacaattgccggaattgcatattgtttataatcaccattgaccaatgagaattgactgccaaatacttcaccataggaaataaaaatcattattaaaccgacccataacatattattcgtcattggtgtatatgatttcccataaaaccacggtacaaattcggatgcatttaccattagtaacatagtaaacagttgtgcaactaataatgtatagtcaagtgatgtttttaataactgatccactttttcattattagcatgattcattcgaagttggaccattcttggcattaaaatggtactaactgaagtaataagtgttactaacattcgcgcaatccgttgtgattgatcgtaataagttaattggacaggccctgcaatccaacctactagcgtactatcaaaattggtataaaattgaactgcaagctgtgggataactaaaatcatggcttcttttaaaaagattgacttagaaaagaaccctttaaaacttacttttgtgatgatcccctttaaattaagccagaaaataatatttgcaaaaaagatgcttaaactattaattaatacgtaataacctaaatcactaggtttctttacaaatataaaaatcattgcaacagaacatattttaattaaggtatttcgaacaacaacttttctaacttctcctaatcctatgaagacccaggaaatgtcaattgcgaatccaattaaatatggaatattcaatagcaagtatgttttatattcactgaacattgcaaagaacgtatacgccagaatcactaaacaacctactaaaaactgtattttccataactgtacaaagttactacctagttcacctttatctttgtgggattgggcaataattcttgaacctaattgattcatccccatcaaaatcacaaaactcagaaacatggaaatagacgtaatgaatgaataactccctagtgctcttgcacccaagacacgtgctacatacggtactgtgataattggcaatgccagtatcaacaactggtaaataccgttgtagattatattgttaagcgtctttttcataattgctccatatctttcaatatcctagataatacatccacacgatttattcattatacgctctcttaaaagttgtctcaggaatcagcttacatccaaaagtactaggccctttttttcacacgatatctaagctttttttacccccgtgaaataccattgaaaaaccctaagccataaaatcagaaagccagcttggactcgctgggaaaaatactgcttagtatcaacttggttagttggcgctttctcaaagccatactcgtttattgaaggactagttaaaaatcagtcctaagcccatgaaaacgataaatgaaagacaaatcaacgttgcgtttttaattgaaatcgtgaaagtttctcgtttgacctgtttgtgcaagaagacccgcgtatttttccaaactggaataatactgagcaacgttagtaaactaaactttggcagcacacccatcaagaccgcgatcaccagacaagcatagccagcaacgtaactccatgcaaatacctgaagcatcaccggtttgccaagataatacaaaatcgtgtgtcggcctaacgcaatgtcttcgtccatatcacaaatgttattagctaacataatgttagaaattgcaaaaatggccagacctgacgcaattaaaacagccagcgttgactgccaagtaatggctgccgtgtcatacgtattaataaagacggcaatccagaagatcataaagcccatcgtaaagcccgagaaaaattcgccaaacgggccttgtgaaattggcttcggtccgccagcgtaaaagtaaccgaccgcatatgaatatagccccatccacaacaacggcaaccccgtttgtgttactaaccatagtccgataatcaatgagattccggctaaaccaaacgtaatcgtccgggcctgaccaatggaaatctggttaacaccgaccacattagtctcttgcaaaaattcttgattgtcgtcattacgtggcgcgtgtaggaagtcttggtaattatcattcgcattagtcgccatatgaaaaagtgaagatgcaatgaaaaatagcaataaataaccaagatgtaactgatgataattataataggcgtacatactccccaaaacgaacggtaacacgctcgcaattaatgatttaatttcaacaaattcaagaaacacttttggtttcaatgatttacaccatccttttgtttgataacgaaacaagttatttgtacctttaatatagattgtattttagaatgtgactggctgcaagtgttggcgtcaaaacgtcccggagccatctctcaaataaagcggggtattttgattatgatgcaaaccatttggcaaccggaaagtcttgtcgcaaaggagctagcagcgctgaagccgtatctagctactaacgtaaaaattgataacgccgccattaatgaccgcgtacacgacttactcgctgcgggtggtaagtttttacgcccgggcttcttttacttgtttagtcaatttggaccggatcataacacggcccggttacgtgctggcgcagcggctatggaactactacacgtggcaacactgattcacgatgatgtaattgatgaatcgccagaacgccgccatgtgacaacgatccaccaagactacggtcaacgtaatgctatttacgccggtgatctgctgtttacctgctatttcgatcaagtcctgattgctgccaagacaactgacgacgttaaaatcaatactgcggcgatgcgagccatcctccaaggcgaactggatcaaatggcacataacttcgatccgacgaccacggtcgatgactacttagcaattgctcgtggcaaaacggcccgtctgttcagcctcagttgtgaacaaggtgcccacttcgcgggtgccgacgcaagcgtcgttaaactagcgcaacagattggtgaaaggatggggttagcctaccagatgttagatgacgtccttgactacgccggtgatgaggccttaactcaaaagccggtgcttaatgacttacgggacggcgtttattcactgccacttatctacgccctgaccgctgaaccacaattggccgaacaattaccccaacccggcgaccacatcagtaatgaacagctactgacaattcgcgatcaggtcattgctttggggggcgttacccaggcacaacaattggccactcactataccaaaaccgcactgaacctaatcgatcagctaccaactggtgaaacacaacaaactttacgccggctagtgactgaattactggttcgcaaccattaatggtagattgcaaatttaatccgaatttttggacaaatttgtcagcataacctgatacggtgtttgccagtcgagtattttaagcggtggctggttaatttggagtaacgtcgtcgttaaatcttgagcactaatgtgctcaaaacgagtccctttaattattgaccgtttttagcgtagttggcttccacggctgctttttctgcttgccaccagtcttcattgtcacgataccagtcgatggtatgttgtaagcctgatttaaaatcagtgaattctggttgccagcctaattcttcccgtaacttcgttgaatcgatggcatagcgtaagtcatgacccggacggtctttaacttgatcataagcatctttgggttgccccattaattctaagattaattccaaaacatctttattgttttgttcgccgtcggcaccgattaaataagtttcaccgattttgcctttggttaggattgcccatacggcgcttgagtgatcattcgtatgaatccaatcacgcacattttgacctgaaccgtaaagttttggtcgaatcccacttaaaatattggtaatttgacggggaatgaatttttcaatgtgttgataaggaccgtagttatttgaacagtttgaaatggttgcttgtaggccgaatgaacgcacccatgcccggactaacaagtctgagctcgcctttgatgatgaataaggactacttgggttataacgcgtttcaggagtgaatttttcaccaacgccttcgccgtgccctggtaagtcttcacgcaatggtaaatcaccgtatacttcatcggttgaaacgtggtgataacgcacattatacttgcgacaagcttcgatcaacgtatatgaaccgatgatgttcgtttgaataaagggtgaaggatctttcaaagaattatcgttgtgactttcggcagcatagtgtaccactgcgtctgtcttttggactaagcgatccactaattcagcgtcacagatatcgccaacaactaattccacacggtctgctggtaaaccggccaagttcgcacggttcccagcgtaagttaatttatctaaaaccgtcacgtgaacttctgggtggttattcaccacataatgcacgaagttagaaccgataaagccggccccaccggtaacaataatatttttcatagtgtgtcgatctccttaaatttcaccgtaaacaaacggattatctttttcaaattcagtaaaggttggttggttagcatcttttttagacgtaattgcttggtcaaaatcaattggccaatcgatgtttaattctggtgtcttgaatgaaataccgccgtcagcttctgcatcatagtagccatcacatttatacaagaagttaacgttatccgtcaaagtgacaaagccatgggcgaagccctttggaacaagtaattgacggtgattgctggcagaaaggatgtacccttcccattgtttgtaagttggtgaacctgcacgaacgtcaacgatgacatctaagacagccccagtcaccacgcgaattaatttcgtttgcgcagctttaccgcgttggaaatgtaagcctcgtaaaacgcctgcttgcgttgaaagtgagtgattatcttgaatgaaatcaatatcaatgcccgcttctttgaaatcgcgatctgaataagattctgtaaagaatccacgatgatcaccaaagacggctggttcaataattttaacgtcttgtaatttagttgttgtgacttttaacttacccatgattacttacccctaatcttcttttactaatcgcaataaatattgaccgtagtcgtttttcttgagtggttgtgccaattcaatcacttttgctttatcgatatagtgcatgcggtaagcaatttcttctagacacgccactttcaagttttgccgtttttgaacggtcgcaataaaactgctggcttcttgtaatgaatcatgggttccagtatctaaccaagcaaacccacggcccattaattcaacatctagctggcctttttcaagatacgctttgttgatgtctgtaatttctagttcgccacgtggtgaaggtttaatattcttcgcaatgtcgacaacttggttgtcgtagaagtataacccagtcaccgcatagttacttgccggatgttctggcttttcaacgattgatttagcatgcatattttcatcaaaatcaacaacgccaaagcgttctggatcattcacatgataaccaaaaacggttgcgcctgattctttttgagcgagagtagacctctcaaaactaaacaaagtttcgacttcgcaaatgtacaaggttttccgtattattccttagaaaggaggtgatccagccgcaggttctcctacggctaccttgttacgacttcaccctaatcatctgtcccaccttagacggctggctcccgaaggttacctcaccggctttgggtgttacaaactctcatggtgtgacgggcggtgtgtacaaggcccgggaacgtattcaccgcggcatgctgatccgcgattactagcgattccggcttcatgtaggcgagttgcagcctacaatccgaactgagaatggttttaagagattagctaaacctcgcggtctcgcgactcgttgtaccatccattgtagcacgtgtgtagcccaggtcataaggggcatgatgatttgacgtcgtccccaccttcctccggtttgtcaccggcagtctcactagagtgcccaactaaatgctggcaactagtaataagggttgcgctcgttgcgggacttaacccaacatctcacgacacgagctgacgacaaccatgcaccacctgtcactttgtccccgaagggaaagctctatctctagagtggtcaaaggatgtcaagacctggtaaggttcttcgcgttgcttcgaattaaaccacatgctccaccgcttgtgcgggcccccgtcaattcctttgagtttcaaccttgcggtcgtactccccaggcggagtgcttaatgcgttagctgcggcactgaagggcggaaaccctccaacacctagcactcatcgtttacggcatggactaccagggtatctaatcctgtttgctacccatgctttcgagcctcagcgtcagttacagaccagacagccgccttcgccactggtgttcttccatatatctacgcatttcaccgctacacatggagttccactgtcctcttctgcactcaagtttcccagtttccgatgcacttcttcggttgagccgaaggctttcacatcagacttaagaaaccgcctgcgctcgctttacgcccaataaatccggacaacgcttgccacctacgtattaccgcggctgctggcacgtagttagccgtggctttctggttggataccgtcactacctgatcagttactatcaaatacgttcttctccaacaacagagttttacgatccgaaaaccttcttcactcacgcggcgttgctccatcagactttcgtccattgtggaagattccctactgctgcctcccgtaggagtctgggccgtgtctcagtcccagtgtggccgattaccctctcaggtcggctatgcatcacggtcttggtgagcctttacctcaccaactaactaatgcaccgcgggtccatcctaaagtgatagccgaaaccatctttcaaccttgcaccatgcggtgctaggttttatgcggtattagcatctgtttccaaatgttatcccccactttagggcaggttacccacgtgttactcacccgtccgccactcactcaaatgttatcaatcagaagcaagcttcttcaatctaacgagagtgcgttcgacttgcatgtattaggcacgccgccagcgttcgtcctgagccaggatcaaactctcgattaaaagtttgtagctcttgttttgttacttaatttatttgctagcgaaattgactttgcaaatatgttttgtgccccgaagggcgaccctacacatttggtttgtcgaaactttgttcagttttcaaagtgcactaggccctgtcaagttgacaaatgaaataatataaagttgaatctgtctctatgcggcttcactccagtattcatctggggtgaggccgtttctttgtgctgagcggttgtggtgattgaaatattcgattccttcctcaaccagtcttacaagctcttcgcaagtctttgctagtggatggcgagccatccaccgtaacttgaattcgttccaccagcgctccatcggtgcgttgtcgtatggtgttcctggtcgagacatgctacgtgtgacgttgtaacgaccaagaaagttgttgaaggcaccagaggtgtaggctgatcctcgatcagtgtgaaccaatgggtggacgtcgccagaagcctcaaaggctcgttggaaaacctcgatttctgctgctgacgtttcagtagtgctcaaattgtaggacaacaaacgtcggccgtagagatcaaggacgccactcaagcgcaccttatacttattatttacgccgtaagtcagttccgttgaatcggacaaccagacctgattaggactgtcgacgtcgaagttctgattgagcacattgtcttgaatgtgctgttcgttctccttatgtcgactgtgcttcttgacccgaatttgacatgtcaagctgagctcccgcatcacacgacgtaccatcctgaaagtaacggggaagtcaattaggtcatcatgttgaagattcaataaaaggttcccagcaccgataccttgatgatgaaaatcaaaccagtattgtgtccgttccttgagctgacgattacgggcttcccaagctgtttcttctcgatttaaccctttgtagtaagcctgccggcttacaccgacaacggccaacagcgtagatattgcaccacgcttgccttgactgacctcattaattgcgaagtaagacagtcgatgttgtttactcaccccctgcgctggatttccagcaatttttttgcgaatgcctccacaagctctttgtctgcgagctgtgctttgagctgcctgatttcaagattggctttatcgagttcagtcagctcagcttgttctttgtgatggccacggttgtccacgagcgcctcatagccgccgtgattggccttgattacccatgaacgtgcttgttgataagagacttggaagcgttcagcggcctctgtgtatgaatgattcagcttggtgacatactcgacaatttcaatgcgttcttccaaggttgttttacggctcatagtgggaacctgctttctggacggcgacgccgtcaaaggtttattcccattatacttgtttacccagtctacgacttgctgcgatccacgaagtccaaacttatttgcaagttcatcaaaggtgccttcgcctataagatatgcgtggactactttgagcttgagttccttcgaatagtgtttgtttttcttagcctcctttagaccattaattccatcacgggagtatcgatctcgccaacgctctagcgtcttatgattaatgccatggcgattggccaccggacccagtccaatttttgattgggtcagttcatctaagattgttaatttctcgagtaccgtatgtttagatctgggcatacaaaaatccctccatagtcgtcagatgaattattgtatttcatctgacaaccataaagggattatcgcatcctgaataattcatactttgttgcgtaaaggtaatttgccccttttaacgtttaatttagctcaaatttaatccgcaactatttttgagtgtatttgagctatttttaagacaattttatttttgattggtgtcaaaagagtaaactactcccttgatcgtacttaaattttttaaattgtcttttttaattactagtgagctgaaattcttgaatcctaaacaatgtttgccagtataaatcatcaaaaacattggtactagaaagatgcagccataatttacgtgcatgttgggtgactctgccggccaaatgaaagagcttgaaacgtaaagtggcgctcgttgcgttccctaattcagctgggaaaaccagttttttcatggcttgaactaagttataagccacaccggcgagtaacattctaaactggttagccgtaaaactggaactatccgttttatcaaaggcaaagccacttttaacttctttgatcagatcctccatggctccacgttggtgatagagttcaaagacgtcactggcaaaagccagctccaagttagtcacgataaattcgtgtttaaagagtagctcgccagcagggcgagttgatttaatgatcacggggtaagcgcgaccccaagtgtccggttggtaatctgtcaaacggtgccactggacatctttttcggcgaagtcttccccaggttgccccacatggatcaagtgctcggcgatccgttgtagttttggattagccttgagacggatcgtaaactttgccccagcttcttcacaggcggcataaatttctggcttggcaaaacccgagtcagcccggactagtacatctaaagcagcgtattgtttcagtagcggtttcaaaaaagcttccgcatttttggaagtgtattcgttacctggccgtaatttagctcctaagagacaacccgaaaaaccatcaaaagccaacaggggatgataaccgttcgtttgataatgggtgttaaaagcactgcctttctggtaaccaaatgtatcggaatgagtcgaatcaagatcaatgatcagttgacgttgcttcttttgtgtgatcactaactgcgctaacttggcgactaattttgtgatcccggccaagtcgtctgcggaaatttggttgatatagcgtgaaagagttggttgcgaagcaactaaattatctaaaacaagctcaaagctcatgtctgcggtcagtttattagcggcagtatcgtcgaaataacccgcaatcagctgaatcaacagttgtttaaacagctggttcttatggtacctatagaacttgcggttttccttaaaatggagagtttctttcaaaaggcgcttaaagtggatctgatgcataaattcagccactaaaattagacccgcatcgttagataaatgaccaccattattagaaagaaccagatttttgttgaagttaacggtttgttgttgtaaagtcgacatatggagcactcctgttctgtgttggttttggtcgacttaacaatagcacaggctgtgctctttttgtatacgcaattaaacacctaaaaggtgttggtttggatcacggacaaacaagatgataacaggcaaagaaagaaaaactgttaaagatatgaattattcaggtattaccaagtccagttgctgcgcgtgctggcggatcttcgggtggctctggtggttcgggtggtagcggtggtgggtcttcaccgacatccagttatgttggcggccgtagtcgtgattattattacgatgatgcgggatgtcggcattactacaagtccccaatgcgtcgtttattcgatagtatagtcaccctgcctttcgtattcgtctcccttgggatcatgatttggcgtaaagtgcgtgactggttaaccggacgtagaaaacgggcactggctgataccatgccgttagatgctgaaaccgcggcgcgctttgaaaatgcattctatcaaattgaaacagcttggccctcaaatgacttaagcaacgtggcggacttaatgacgccccattttcagcaccaacaacaacgcatcttaaaccgttatcaacggcaccataaacataaccaacttgagagtatcgccattgtttcaactgagttattattacctgaaaaaccgaaccgccaagatattctagtgacagcgcaaatgcgcgattacttcactgatgagcggcagacagccacggttaatgaccaacgtcgtgaagcggcttatattgaacgtttcagcgaaatttgaacgtttaaattaattgatggtcaatatcgtgtcgctcatattaatcaatccctataaaagagctaccagttggtggttcttttttgttatttaattggttaagtttattgcgttaaacaactttttctcttaaaatagaccttatcgatttaaaaattgtttatccattttgattagaaagtgaggtcatttgatgaccctccatgttggcactggccagacacaaacggccgtttccttaatgccgcgtaacctagacgattgtgtgcgtgaaatggcactcgttgagcaaaagcaagctgcgattgatattctagaatggcgcttagactattggcaaacaccagcgaccttattaacggctggtcaccaaattgccgcctgcaagcaccccgttattttaacgctcagaacaacccatgatggcggcctgtctgatccaaccgactatttagaccgctatacagctctattatcggctcaaatcggcgatgtggttgatattgagtggtctttacctgaggcagttagaaaagccgtcagcacgcttgcacgtgcgaatggctatcaagtgttactaagccatcatgatttaaagacaacccctgataatctaacacttcaaaaacaactcgcagcaatgcatgcgacgcacccagatatgttaaaactagcaactaccgctcaaagtaatgaggatactactcggttaatggcgattacccagtcttttacacatgatcacacaaccccactgatcacgatggcgatgtctgaatttggcttagcctctcgcatttttggtggtcaattcggttcagctgtgagtttcggttaccttgaacaccccagtgcaccaggccaattacccattgaacaactcaaaggcttgttgacaatgcatcaaaattaaccgcacaaaaaaagccccgcactagttagaagcaagatgaatcaccacacgacgggcgtgccaagtaatcctaccggcgatgtgaaagagactgaaccgtagcgaggagatggttgaacgacggtcttccgagacaaagagctgtttaaagagctgaaccaggttataggcaataccggtgatcaaggctcgtgcagtgttccgtgcaaaagttgagctgtctgttttgtcaaagccaaacccgcatttcagctccttaatttggttctcagcattgccccgctgtctataggtcttgaacaaagtctctggagcctcggaggccaggctggtcactacgaatgcgtggttccagggaactagctcatctgccgtatgagtagaacatacgataacacggcgagctttaccccatgacgcggcctgatacttgaattcgtggtagacgcatttgctctcttcatattttggagggcaatccactaaggccgtttctgccagcttcccaagctttgaatttgccttgagtcgaaccaaaaagtcgacgccatgtgtgtcgcacatctcgtaaaattttggcgcagcaaaccccgaatcgcctcgaatgatgacgctggtgctttgagggagcgccgataggcgcgaaaaagttgtctcgacgaacttatcggcttccttgccggtgtactcattgccagggcgcatcaaggcgtctaagagcaacccggactcttgatcaaatacaacctgagggtgatatccataggccatatagtgagcgttgaaggcggaccgttcttgattaccgaaagtatcacaatgcgttgagtctatatccagcacgaagcgggattgaccactaagacggaaagccaaggcggctacttgccagataagcttccgaaagtcatctaggtcggcgtcttcaaggcgcttgaaaaaccgtgaaagtgagggctgtgagactagccgagagctacccaaggtggccgccagtacgggatcacgttgccagtcattggcactactgtcatgtaaatacccggcaacgtcgagcaacaatttttccaagaagatgtcgatcatcgaggccttccagaatcgtcgttggtctggtaacttgaggcactgattggcaagttgcctaaagttgatacgatgaagaaactcttggaacaaaacgagcccggcgtcatttgaaagttgaccgccgtcggcggtcagagtcacattggtattgcattgcagggataagctggttaaagttgagatggtgtgaagcctcgctttcgtgatggttttcgttgactcaaccttagcatataggcgcacccaatgggtgaaacaccaaagcagcgcagtcccgtgtgaatcgtgggattgcgctgcttttttgaaattctatgaataatccaggggctcctatgatggaattacggacaaactgttcgatataatacatcataaaggagctttttattatggcaattaaatattcaaatgaatttaaagaatcgattgttagcttaagtcagactggccgttcggccaactcactggctaaagaatacaacgtcagtgtttcaacggtcactaagtggattaaacaagctgatcctaacaacactaaagtgctatcatcaaatgaacgtgctctgattaaagaaaataaacggttaaaagaagaacttgatattttaaaacgagcggcggtgctcatggcaaaaagctaattattaaagggcgtgccctcgtgttagaagtcgtcaacgctaatttacttgctgggcaccgcattacgcgtatcttatcagtactcaaaattccgcgctcaacctactatgattatctacattggcagccaagtagaactgaacgccgccggcatttaattaaacaagaagtgttaacggcttggttaagatatccaatgtatggctacccacgattaacgatcttactaaatcaacagtctgatattcacgttagtcagcgtctggtctatcaacaaatgtgtgaattagggattagatctagaatggttaaacgaatcaataagccaaccactcagactgattatgatcagcgaccaaacttgattaagcagttaactgatcaatctggtattttattgactgatattacgtacattccccttaaccatacttggtgttacctagctagtgtctataatccagtaacccgacgggttattgcttaccaacttaatacgcagatgactaaagaactagcgactaacgttattacccaagtcatggcgcaagcagttaaaccacaaattattcatagtgatatgggaagccaatacacaagtgacttatttgaaaacactttatcgaagtatggtatcaagcattcttactcccgaaagggtcagcccggcgataacgcgcgaattgaaagttttcattcaattttgaaacgtgaatacgttaatttccaagattttaagacaattcatgaagcaatcgccggaattgataactatattcgttggtataacagtgatcgtatttcacttgtagcgtagctacaggctattaaattcaataatgttggggcttatttaatatactctaaagcgtttttaaaatctgaacgggcgcgcattttagaatcaagttagccactgtctcaaaattttttggacaataaaaaacatcaagaacagatatcctgtatcattgaagttcctacacaaacaatggaagaggatattgtcttgatgcagaaacaggatagcacacaccgccaaaaaggtcagcacttaacatcactcgagcgcggaaaagtggccggattccgccaagctgggaagtccaatcgttggattgctgctgaaattggcgtctgcccgcagaccattaataatgaaatcaagcgaggtacagtagatcaggtcaagaagagtaatggcaagcgcgtctaccatcgacaatacctgccagaggctgctcaggcactttacgagactgcacgcttgagctgccatcgtcctgacaagttcgccagcgtacaggtcttcttagcctggtacgtacagcgagctaagcaggacaaatggtccccggatgcttcaatcggctatgccaagcgacacaagctgtttactcctgaagagcttgtttgtgcctcgactttgtaccagtacattgacgaccaacgcctagagattcgaaatatcgacctgttggagaagactaagcggaagacctctcaccagcaccacaccaaggctaagcgcctggctggccgcagtatcgaggaacggcctaaggtcgttgaacgacgcaggcagttcggtcactgggagatggataccattgtcggtaaacgcaatggcaaggagagcgtcatcttgactctgattgagcgcaagacccgttgccaacttctccgcttgatcgaaggacgagatgcagactctgtgagctatgcattgcgtgggtggaatcaagcgcgaatggggagcttgcatcaagaccatcacagccgacaacggacccgagttcaccgccttaaatactgcttttgctgggacggaaactgagatcttctacgcccatccttacacgtcctgcgaccgtggcaccaacgaggcacataaccggatgatccgccaggacttccctaagggcatgtccctagatgacattagccctagtcaagtgcaggccacgcaagaccgcttgaatcagttgcctcgcaaacaacagggctactgcacaccccagcaaaactttgaggccgaagctcggcttatgaaatagtagcggaagaaatattcctgctattattaaattaatgcctaaaccaataccatcaaaaaagctactttgtttgttattgttcatgagttgattcttctccgcttattatgttatctagggtgtgtcaagaagtttgtgtaaattcatttaaaccttattcagtttgatttatatttttaaaacattgaatccaatgtgtcctggcattgtttaaaacctttatgggctctaccagtttttttattattataatcaaccatttgggtgactaaaaaacgatcaagagcttcttcattaggaaattgttctttgatttttgtttttcttttcaactgtttattgaaagattcaataatgttggtggaataaatagtacctcgaatagctttgggaaattgcgtgaagatcaggagattttctgtgttttgaagagagtgcgtcattcttggataacgtttctcccatttttctataaaggtttggattttttcttcaccctctttaaaattgatcgcatgatgaattcctttgaaatcactggctacttctttacgatcagaaacgcgaacctttcccataatgtttcggttaatgtgcacaagacatcgttgaaatttagcttggggataatttctttcgcaagcattttgaatagcggtcatgccatcggcaacgataagttgcacatcagttagtcctctagaaacaagactgcctaataaatcggaccaagcagcatctgattcttgtggggcaataagataatctaaaatttctttttctccagaagaagtaatccctaaagcaatatgtaccgcttctttctggacagcgtcacgtcttaagggaatatatgtagcatctagaaaaagacaaacatattgtgaatgaaaaataggacgggaatgaaaagcagtcacttgttcatcaaccatttttgtaatgttagaaatggtcgtaggactatagtgtgaaccatacatcttttcaattaaatcggcaatttctctagtggtaatgcctttttcatagttaaactaaaaaacactatccgattggatagtgtttttttaactaattgattgaacgcgactggcaatcatcaccactaaacaactcttgatcatttcaatcggaaaatacggcacaaaaccggtcattaagccggtcactacggataattttaatgaccagattagccagagtgtgccaaatccgagttgaataatgcttgctagcacattgccgccgagaagtacgcggttcgattgtccaaatagttgctgactatagtgaacaattgccacataagcgataaaaccaatcagatagccgcctgttggtccgaccagcactgcagccccactggcataatttgcaaagaccggtaagccaagcatgcctagcatgagatagctcccgatgaccagtcgacttaagcgccatggtaacgtggtgccaattacaccaactgcgagcgtttggagtgttactggaaccagcgaaatcggtagactgacttgagcgctaaccattaataacgccaagcacatcccgactaagctaacttttctggcaaccgatagtgtcatttaaatcagctcctccttaaaatcaatcttttggccgactgccacttgcgagccattgctcagaattaacgtgccatccgctaaaagctgtgtaatgacaagcccattttgcaaacgtcggccaataatcgccgaccagttgcaataatgagcaccaatcgcctcgtccgcttgggccaatccggccgctagtcgattaagatacgtggcacaaaattgattgatgttcacttggtgggcgtttacggcttggcttacatccattatgaaactgccgctgccgtcctttttgaatatgtgcatgctttctacaacatgctttctacaataggaagagaattcatagttcactgggctaccagacccccttacaagttgctcccatggtgaatatggatggcaaaaataaactttgatctgataatcctgttctaaggcctgataattggcaaactctttaccatgatcaacagtaatggattttacttggggaccgaaggcccccataaacttaccaaaggcggtgtttagagccttagccgttctattaggggctttgatggcccatagaagtcgggtcttacgttctacgaatgtaaccagacatgatcgtgactcacttcgactagaaagcaccgtatctacttcccaatgaccaaaagctaaccgttgattaacagttgttggccgttgttcgatggaagtcccacttgtaaatttcccacgattttcgctcactcggtgctggcggacattccgattgggtagatcagtcaatttgaaggggagccagccacgattaagccaattataaattgacgcagtgctcaagttataagcggccgcaatggtttctggtgaccaggttaatcgtaagtgattggtaattaaagtcgctaatgctgccgtcagcatcgaacgacgaccgcaattccgccttttgcgatctgcatcttgctgagctaattctggatcataaggtttaactcggtccaactcatagctaatcgtagctttggcgacgcctaaggcgtcagccattacttggtaagatttattcccctcattgaccagttgtgctagtgcgccacgttgaaaacgtgataaagtagatgtacccaaagtaatcactccctatattggttggaattagtgttctttgaagcatttctgacaaattatcaccataatagatgttgtcgcccaagattaagcatactgaatcatcgccgatgaaatccgccccaatcacgaaagcttctgccaaaccattgggttgttcttgaacggcgtattcgatgtttaaccccaaatcattgccgttgccaaataactctttaaaccgtggtgtgtcagttggggttgagataaccataatatcttgaatcccggccaacatgagcactgacattggatagtaaatcattggtttgtcatagattggaatcaattgttttgataaagcgcgtgtgatgggatacaaacgtgtcccggaaccgcctgctagaataatacctttcataaaaaactcccccttaagtttgaactaattaatttagaaatattatgtccatttacttcttaacagattttaaaattctatatattaaatacattagataattaaattcttcatttctccaaaacaaacctgtaaacagaatacataatattaaaatcgcaattatggagcgtacaattattcctgttagctcaccaatcagtacaaatgaagtgattgtgtaaaccatccctataattaaaactcctaaaattataaataaatattgcttgattaaaaatgattttacactctttttaaatccgtaatggaatatttgcctattttcccaccaactacttattaaaatagtcgttaatagagtacctgttaggacaccatttattccccaaccaaagtacttggatcaccagcacgacgcggtgccattgtcacaggaattgccttgccagtcactttgcgagcggcttcgacaatttccatatttgaaaaaccagttgatgagcctaagttaaaggcgttactatcatggccttcttcgaggtaaccgagggccaaaatatgggcgtcggctaagtctaacacgtggacatagtcgcggacgttagtgccatctggtgtatcataatcatcaccaaagatggagagttgttcacgtttgccagcagccacttgtaacacgattggtaacaagtgggtttctgggtgatgatcttcaccgattgaaccatctggtttggcaccagcgacattgaagtaccgtaatgcaacgaatttaataccgtaagctctgtcagcccatttcatcatcgtttccatcattaatttactttcaccatacgggttagttgggacttgtgggtcggattccttaattggaattgatttcggttccccataagtggccgctgttgatgaaaagacgatgtgtttgacgtcgaattcattcatcacttcgagtaaggcagtcatgccgtatgtgttattgtcgaaatatttaagtggtgcttgcatcgattcgggcacgattgagaaagcggcgaaatgaatcacaccgctgactttttcttgttggaagacgctgcgcatgaaatctttgtcgcgaatatcgccttgtttttattgatggaggtttagctcagttgggagagcgtctgccttacaagcagagggtcacaggttcgagccctgtaacctccattgagtcgttagctcagttggtagagcatctgacttttaatcagagggtcgacagttcgagcctgtcacgactcatcggccaagttacacgccaaaatgcgggtgtggcggaattggcagacgcgctagatttaggttctagtgtctatatagacgtgggggttcaagtcccttcacccgcattcaattgaatattcaatgaaagttatcttattatgccgacttagctcagttggtagagcatctgatttgtaatcagagggtcgggcgttcgaatcgtctagtcggcattaagatgcggaagtagttcagtggtagaacatcaccttgccatggtgggggtcgcgggttcgaatcccgtcttccgctttcattatgattaagccggggtggcggaactggcagacgcacgggacttaaaatcccgcggtaggtgactaccgtaccggttcgattccggtcctcggcatcataatgaaaaatgcacccatagcgcaactggatagagtgtctgactacgaatcagaaggttgtaggttcgactcctactgggtgcatataacgggaaatagctcagcttggtagagcacctggtttgggaccagggggtcgcaggttcgaatcctgttttcccgattttggaggagtagcgaagtggctaaacgcggcggactgtaaatccgctccttcgggttcggtggttcgaatccactctcctccatattttttagggatatagtttaaaggtagaactacggtctccaaaaccgtcagtgtgggttcaattcctactatccctgtttatattatagcttgcatattatgtgtgaatgtagtataattattcatgttaatgatggcggtattggtgaagtggttaacacatcggtttgtggatccgacatacgtgggttcgattcccacataccgcctttattcttgggctatggccaagcggtaaggcaacaggttttgatcctgtcatgcgctggttcgaatccagctagcccaatttactttttaagggacaggatttgttcttttatggcggtatagccaagtggtaaggcagaggtctgcaaaacctttatcaccggttcaaatccggttaccgcctttgcgtttaggcgctaaccttaattggtcaaaatgccggtgtggcggaattggcagacgcgcgggattcaaaatcccgtttcctcacggaagtatcggttcgaccccgatcaccggtataattgaacattatacagttttaaaaagccttagagatagggctttttttgttgcgttaataccatggttcttttgaatactaatagttaattcaatctaccataagcctaccgattttttaatattattttattcatcaatttccggcgccgacccaagctctgcctgaatcatccagattttcttctcaattgcggttttgagaccaatgaaaatatcttgggtactgaagtctttttcaacatcggatacttcaatgccgtgttggtaaaggtcttccaagtaacgatagccatcaactaagtgtgcgaggcgttctggggttgttttgtcccattcaccaggccagtcttgaatcttagtgttttcggccatttcttttaaggtcgagtaaggactgccatcaagcgcaatcagccgttcagaaatgacatcgagttggctgtcaatttcttccatgaactcatccatcaaggggtgcaacttcaaaaagttgggtccacgcatgtaccaatgcgtctgatggataatcattgacatctggctcaaatcggcaacgagttgatttaatactgctttggttttcgtatatttcattagattgatctcctttcgatatggttattataacatagtggtagcttaatctgaaacgttatacactggcaaattaagttatttatagcccgtagaattaagtcgttttgaaaagatggagacgttatatggtagattgtaaaattaacgacgccgcatcaaaggctataagaacgcccacaagcgcaagaataagaagatatacggcgactcaatcgagttgcgtcctgcggccgtgaatgaccgcacaggcgtgggacattgggaaggcgacttggtcaaaggtattcgcttagctgatgagccagcattaatgacgctcacagaacggtacagccggactgagatcatcgtcaagattcctgactatcatgcgggcacctaccttaaagccttgcaggacacgatcgacgactacggggccaaggaatttgagagtatcacttttgacaatggttccgagtttgccaagttatcagagattgttggaacccagatttacttcgcacatccgtactcgccttgggagcgtggcacaaacgagaacgccaatggactgcttagggaattcttcccgaaagggaagtctctcagagcagttaccctggttgaaattcaagcagtccaatccgcactgaaccatcgtcccagacgtattctgaactatcttcgcccatgcgattactaccgatgcatggcgtaacagcctagaccactatcaagaattcgttatcatcgttgcacttgacttgaaaattgagggcttatacagctgtcgatgctgctgaagaagaacctggcaagtcaatcaattacaaagtgaacgtggttggaacgcaaaacattgccaatgctgctgaagcaatcggcgcaacgcttgtttacattagtacggattatgtctttgatggtacgaatgatcaaatgtacacagaagaaaccccagctgcacctaagaatgaatatggtcgcacaaaattggctggtgaagaagccgttgcaaatacaatgagcaaatactacatcatccggacttcatgggtctttggtgaatatggtaagaacttcgtttacacgatgttaaatcttgcgaagacgcatgatcatttaacagtcgttagtgatcaagtcggtcgtccaacttggacccggacgttggctgaattcatgttatacgctgttcaaaacgacgtgccgtatggcttgtatcaactttcaaatgacaattcatgtacttggtatgaatttgcgagcgaaatcttgaaggataaagacgtagaagtgagtccggtaacatcagacgaatatcctcaaaaagcattccgtccaagacattcaatcatggatttgcttcattaacagtcgctgaatcgttctaacgctcaaatgacttaattcagctaatttttcttgtgttaatccttttgactttctaattagtgtaatacgcgtttcgtgactcatacatttttctctctttcactaatgattttataaataatcatagatatatgctaaaagagttaacacgtcagtagtccgacaattaggcgacaggttactgacaataattagttatcatgcagaattctgcccgtctgggataatcttgagacggtttaaccacaataattaatttttgaagtttctgatgaattcaacaatatagtcactaaaacttattattgaaaatccaagcaagagacctaacatagataactcatttgataaaaagatcatactaggcacaataaataaagcgccaatcaaaataacaatattttgtaaattatacttgataagagagttaaatcgaggtgtgtatttttgttcatcgcgcataagttcatcgagtggaatattaaatagattggaaatcataatgatattttctttgtcagggtaacttttattcctttgatggatgggcataataaaggtcagcgacaccggtaagtacagcgccaacttccgagaactcagcgccattatcggcagtaactgacttcatgattgatccgtattcttgacagatctgggccagctcatagttgactgaatcggcatcacgaccatcgatcaaacgtagaatttggcagcgggattgacgctcgatcagcgttaagatcacactctcttgaccgttgcgcttgcccaccacggtgtccaattcgaaatggccgaactcttggcgctggtcgatacttttaggccgttcatcaatactccgtccggccagacgcttgtgcttgatcgagtgatgatgtttggcacggtggcgcgttttttcgagtagatcaagattgcggacttcaagtaactgggcatcaatatagtggtatagcgtcttggtcgagaccatctcctcaggttgatataagccttcaagtttggcccgtcctactgctgcatcaggcgaccaaccatcttgacgcaaatgagtcgtaaaatagtcgataaaatcagcgacaccgacgagtttcaagattgcgggagtagggtttgaacctacgaccttcgggttatgagcccgacgagctaccagactgctccatcccgcgataatataaaggagaatgagagattcgaactctcgcgtgggcagaacccacctgacggttttcaagaccgttcccttcagccagacttgggtaattctccataaaacatataaaatgtaacattgttacaatgacccgtacgggatttgaacccatgataccgccgtgaaagggcggtgtcttaaccacttgaccaacgggccatacaaaacggagaaggagggatttgaaccctcgcgccagtttcccgacctacacccttagcaggggcgcctcttcagccacttgagtacttctccatattatttagataatgggcctaaatggactcgaaccatcgacctcacgcttatcaggcgtgcgctctaaccagctgagctataggcccatgaaaagcgggtgacgagaatcggactcgcgacaacagcttggaaggctgtggttttaccactaaactacacccgcatattcatgatttcggctgaaccgatcaccgtcaacaatttcttatgaattatctcgatgtcaaccttatcaggctgaattagcacaaacagatgccgaatacaagcgatcacgatgtggtcggaaaactaagctgagcgatgagttaaagcaaaaaattctcaaccatttacgtctaagctggtcaccaggaatgattgctcacgaatttaaactagctactaaatctatttataattggctaaatcaggggagaattggtttctccttgaatgatctacctgaacatggcgtacgccaacggcgtaacgttgaccaacgatccaaatataatcaatctttggggcgatcaattgaacagcgtcccatgatgattaatcaacgtaagcgcatcggcgattttgaactagatacagtcgttggtcctcgtgggcatagtaaggcagttttattaactttaatcgatcgcaaatcacggttcctttgggcataccggttaaaagatcggacgacagcgactgttaatgaagccttgcttaagcaggatttctcgaccactggtttaaatcaaaaatggaccgctgatatgacctatattcaaacgaagcgtaatggctggtgttacttatcaaccatcatggacctgcactcacgacggattatcggctattcgttctcaaaaaagatggctactgatttagtcttaaagacccttgaaagcgcggttaaaaatcgaaccattactggggacctgattatccatacggatttaggatcacagtataccagcgatgattacaatcaacgtttaactgagctacatatccgccactcatacagccgtaagggttatccgtatgataatgcgccaatggaatcctttcacgctttcctcaaaaaggaatgtgtttatccagtgccggtctttgaagattatgaaactgccgctgccgtcctttttgaatatgtgcatgctttctacaataggaagagaattcatagttcactgggctaccagacccccttacaagttttcttgattatttggatggtttgtttaacagattggtcagatgaaccgttcggttcatgactaataatgtattcatacgtacttttggccataccaactatttttagaatttttactagtttgtgtttaagccttagctcttggatgacttgcgcttgttgttttcttcttcctggactaaggctcttaatttttttaggtattcattctcgatttgtagtaattcattttcttctctaagacgttctaactctgtttgttgccgtttttttgattgtttatcagctgacataattgtttgccgtcctttggaacgatataaggcatcagcaccctcagtctcccaaatatgttgccattgccagatggtcccgacgtttgagatattaaaatgaagtgcggttttcggataagaagccttattcgttttcatccattttaaaacattcatcttaaatgagccattttgttttaattcttgaaaaattataatcatcaatccaaaccgatatttgtgaaactagcgtttcataagtatcggtttctttttggtagaaagcttcggctttcataatatggaaaaagctctccattgctgcattatctaaacatgttgctttgcgagacatactttgaaaaatgcgatgttctttcaagatatgagtccaatcttgatgctggtattgaaatccttgatctgagtggactgttgtccggtattttaaattcttagggattttcttaactgctcgattcaaaacagttgtagtaaattcaacagtagggtgtttactaacttgatggctgagaatttcacctgagaataaatcataaatacatgtgaaataggcgcgttcatcaattggaggattcggcacatcttggttacctggtggtgatggctttcttggtgaatgtaatcaaagatattggttacttctgcgcaaggaagcccagggctttttttaggatttcgttctcctcagacagcgaagccagtcgcttttccatcgctttgatttcgtctggcgatttaccggattgagttttggcctggccctggatccacttatgaactgttgaatagccaatgccatattctctggccagttgggcagctgattcgccttgcttatataggttgataatgttttgtttgaattctttgtcgtaacgagttggcatgtaaaaattccttccttttgagagaggtcgatgacagtgggctcgattagcttcgtacttagcttgtgctgtttctggtgagtatacagcgtaatattggcgttgaccattcactttttttacttggtcgatctcgccgcggcacaattcattattgattgtttgatgacaaacattaagcgctctggcaattgcacgattggaatagccttggctgtgcagcgtagcaattctgcctcgttcaaacgaagttaggtgctgacctttttttctgactgtggtattctgttcttgcatcaagacaataacctctttcattgtttgtgtaggaacatcaatgataacagagattttgcgggagtagggtttgaacctacgaccttcgggttatgagcccgacgagctaccagactgctccatcccgcgataatataaaaatattataaccacctacaaaatctcaccaaacgatggaccttgtaggactcgaacctacgaccgggcggttatgagccgtctgctctaaccaactgagctaaaggtccaagttttttgaaaaatagcggcgaaggggatcgaacccccgacctcccgggtatgaaccggacgctctagccagctgagctacaccgccaaaaaacttaaatttataacatgtaacttacgttacaacttttttatttgttttataatccagtccaaccgattaattcatttaatgaatctttattacagaattgtttcattgcttagaaagcgattttattaagttgaggttgaaaatatctgtgttatactgaaaactaagtgtttttatgaaatcttattactttgtaattaacgatagtatgcatccctcttattctatctttgtataaggaatggggagatggtggctacgtgtttgcagaacgtgagactctggaattctatgcgttatagttaccattttgtcagaaattccactcaatcatttgggacgctgttcaaccttggttttggaagccgaagccgctttccacttattgacggtaacggagtggctatccagttccttcatgagccgggaaatccgtcgtggactgcaccgaagctgcagtggttgaagttccagattcaattcatggtggatcttcataacaccgtatcgctgcttaaattccgcaaagatccgcagaatccgttgtttcaagcccgcatcttcggcccggcgttttgaaggtttgggggatcgataacgataatactgagctctggaaacacctcgttcctctgagcgcgggactaacgaagcgcataatcgaatgatccgccgcgatgtacccaagggtctatccatggatattttgggtcctcatgatatccaagcagttgagtcaaagctaaacaatttaccgcgccggcaaactggctatcaaacacccaaagagcttttctccgctgcttccgccggttaagttaagtccataaaatatgaatattaatgaaaatactgatttaataggatttatcgtgtggctaatttgttcttccttggttccctagcgaacttcagtaacgtctgttactagtttttgataaggacgatcagtgaagaaacgacggttgattaagttcttagcaacggtgccaacattgcctctatatgaattatatttacgagtacgtttgttaaatgcagttgatagtaattgcagttctcgcattaagacaagtacttttttatgatttactaagatattcatacgatgtaattcaccagttacacgacgataaccgtacgctggatgatttatataactaaatgagagtaggcgaacgcctactttttttaaggagaagagttaacgatgaaaattttaatcactggtgcaaatggtcaattagggaccgaattacgacatttattagacgaaaaccaaatcgaatatgtggggacagatgcagccgaattagacattactaatgcagacgcagtcacaacatactttgaaaagaacaagcctgaattggtttatcactgcgcaagatagaaccggtcactacgcctttcttaagaccggccgtgcgttcttcaaggctctcgccagggagcttactcgtaagccgcgcgtacacagcgttgatagcttcgtacacttctatcgcgaccagggcaaggcttgcccttcaacgacaactgtgtatcgctacatcgacgccgggctgcttgagctagacaacatgacacttcccaagaagctcattgaattaggacgttttttgggcctatagctcagctggttagagcgcacgcctgataagcgtgaggtcgatggttcgagtccatttaggcccattgtactaagaattaaatagtaccaacacgggggattagctcagctgggagagcgcctgctttgcacgcaggaggtcatcggttcgatcccgttatcctccattgatgacaatagtcatcg
